United States Patent Application Publication US 2022/0167576 A1 - sequence listing, part 15

SEQ ID NO: 30 - DNA, 35937250 bp, Oryza sativa (residues 29,595,385-31,709,340 of 35,937,250)
  misc_feature (5969519)..(5970518): n is a, c, g, or t
  misc_feature (13681864)..(13682863): n is a, c, g, or t
  misc_feature (13684155)..(13684254): n is a, c, g, or t
  misc_feature (18795366)..(18796365): n is a, c, g, or t
  misc_feature (24815509)..(24816508): n is a, c, g, or t
  misc_feature (35936251)..(35937250): n is a, c, g, or t
gtgaggatttgcttgctagcaagttactgcagtggtatctgtggtatgattgtgttgccttctgcaaacttatttgatcggttctacattgtgtttgctctagaatttagttacccgcactcgtcctcctagaataagacaactatggaaagaagaaaaattgataatcaagtgaacataggtacagtcaactatataccttctcaagtgggtttgggacttaaaataacaccacaggtgagctaaaatgatactgagcattcatttgaacagaagtactgatgatgttggtgtttggcatgtgcttgttttgttttgcaaacaaaaaactacaaattacagtatgccacccctaatggtgatacgatgactactaatataccattttggtaccttaaacagttcttggaagtgctcatgcggtgataatagttctatttctgtaagcatttgttctgaatacatgcacaatcttttcagggaggccaagatcagctgggtcctactttggcgttccagttccaaggggtgtttatgtagggggttatggtcagcaccggacacttcctcttgggtattaccaaggattcccggttccgcaatacaggtatgatgtgttaacttttccaatgcagcttcctgctcttagatggcccatttgtgacaatcttcaagtagttcttacttaggcgtccacatttggcatataatcttgtggcaattactttgtgtagattgtgcatagcctgcatcctattttttttctgctcctcttcgaaaattgccaaataaatatgttcattttcttcgtggaacataatatcgctgttttggaagtcaataaagtgtgttcggtcattcattttcctccttttgcagctacactacatatgggacagaatacatctatccacaggttgaagtgtgaaaaatattacgtttaattttccttgcgcaacataagggttttacaaagcatcgactgattctgatgagagatctctttgtagggtacattaaacccatatgttggtcagcaatatgttccaatttatggagtttcatccgcagcaaatactgctagccaaccatttagccagttcagcccgtccatttctggtgggggtaatggttatgtggctattcatggttacaatgtgccaggaaatccatttgtacagttaactggatcaaactttagcagtgcatcgcctacacctcggcccaccattcaggccccctttttagttggtaatgtggtcttctttgcctattttttttagtatttagtgattcctcttgtctttccagaaaacacaatactgtgttatgctatatgttctcacaccaaatttaccaggctaacatggatgctatcgttcattcgtcaccctgcatctttttatagtgtctgcttaagtgttctccttttgtgaataacttcatattacttggcctttgtagcagcaccggttcctactcacccgcacttggtcctcccagctcactcacctcagtttacacaggctagtggttcagaccaaagagcaagctgaactatgctgccaaacatttgtaccttgaggtttgttctgtctggactgctgttatcttttcttgtgattatctggtagtaactgttctttttctgtccctaataggtacccttagattgcagcaggacaaaagagcagtgctgctgtatttgtagtactggttcttacctggcaagtaatcccccttgcattcataaggtaccaattatgctgtactgagaagccatgcttacattcatagaatgccaatcttactcttatgggaaattagtccatcaatattctgcccttcagaagttcagatgcatttagtttcagaacaaaatgatggagttacctattggttctaacttgtcagaactcaaaagggacaaactttgatgttaatatgcttgtgttttgtctcttattctcattgttgtactccttaatctcgttatgttttttaggatctcctattatgctccaatagtattgcattcgatactgggtgatgctttcccataattaacttgaaaccaaaccaggaaattcattcttaacgttgatgttagattagttttgcatctaacagaagataagtacattgatggcatcatggcgttcatcattactctgaacatacagactaaacagccaactgaatcttaatcaatctgtttgcttgtgatatgatatggtcgacactaaatagcaaaaatttcccagagaaattctttctgtttgcttcaggctttctttgtttcttgtttcaaaacattgggaaatggtttatacgtgtttgtctgaagttattgtaagccaattggatcatgtgcccgcacgtgtatactaatgtgatcatgcatcttgttttttatcatatacaagttttcattttattgacctgagttctatttctgtaattttgattattatgataatcttcgctatgaaatttctgcaggttgcccttatcatggtcatcagatgtacctggaatcatgatgttgccccgatggatgggacaatgatccaagagcaacggttgctcttgtcagttttgcttggttacatcctatgtctcaatgggactgcgaccattgctgcagcttgaagctctagatacagcattattgatcctgtatctgacagctcattagcccatggagatatactggatgctggaatggagtccagcactctgtaagatgactaatccccttggattagtcatgatgcactcatatgattgttcacctaaactcctgaagaatcatcaagctactatgtggttgattatatcccagtgttgaagtctggcacaagtccaacaaatgtagcccgtcccgtcagtcttgtgtctgtctatggtcatcgtcgtgatctatgcttgatcggcctttggaggtataaatagttattgcgtccgcttcactcatcatgtccaaaatgttggaccaagatggtccttcctcctgtatctgtaacccaagtgtctaccggaactgctcagggtcgttactcgttaccaactggtagcgaggtcacgaggactatcttctatggtgttactggtatcggtatcagaactaccgtctattgtgttactggtatcggtatcagaactgttgttatgtgtttaatttttcattgctatgtgctcagcagttcctcgacttccgagaacggcactttgttgtccgaccaaaataaatcagttcggatgagaaacccatgctttggggtcttatcggtgttgtgtaagcctggattgttaaaacttgtactatttgtacaaattgttttgctgttttgcagtgatgtgtattatgtgaaattgtttcagaaattgggtgttttctgtgtgacgacaatgctctctgctcgagttagcggtatcagtcttgatcgttaaaacttgtacaaattgttctgcggtttggcagtcttgtgtattatgtgaaatattgtttcagaaattgtgttttctgtatgacgacaagtcgacaatgctctctgcccgagtcagcgatattgttcaagtctaggttgttaaaaactttactatttgaactgatttatctgcggtttcgctgtctttattttgtgaaatattgttacagaaaattgagtgttttctgtatgacgacacaatgctctcagctcgagttagctgctgctgccaatgcactaacttggagctttggaagtacaccaggtctgtgaatatgaaccctgagatttccccttctgtgcacgattcaatcactggtgctgataatgatgtgagagaatcgtgagtaataaacaaatgtacacatttactttacatacaatgcattctattctgccaaagccaaaccaccagaggataattcgtcagtcaatacgttgccttactgaactgctgttgggaatgtggcgaatcatgtctgaagctactgaattctgattctggctcttgaactgaacacactccagcttcagtgctacgagggattgaattgatggcctaacagcataaccattttattccgtaaatccagatcattagagcttactgctggaacttacagaagccatcatagaactcttaaatggaggttgggatatccagctttagtcttgtacttctcgaacagttcttgtagtgcgacaacaaattgttcatggacttcatttatctgccacatcagggaattacccaattttaattgtaagaatatatacatttttatttttttaccattcaaaaacaattaaaacaaaaaagatcctactttccatggtaatatttatcttagaacatcatttaatttcagttttttagtgtgcagactgatcaaaaggtgtacttggcataatgtcaagatgatatttcacctcatcaaaggtaggctgagcatttttcttaacctcaattggtcttccaacaaccacgtgcatgggtgtcgcaaacggaatgggagtcctgcatcacaatgtgcaaggacatatgaactcttgaccaaataaaaaatattgaaaaaatatatataaactgcagaaagttacccaaattttccccagaacataattggagtaaatttaattgctctagcaattttgacaattaatttgccacctggtctccaccacttataaacatagctctagtcaaagtagtgccaaaaaaaaatcagcaaactgaataccatgaataaatttactatatggataaggaattttgcatttatgaacttattgggtgcaagagtagattacctgtccgaaagcgaaaacagggactaaaggggaacctgtttccatagctatcttaacgaaaccttttcttgatttaagaaaagcaacctgtcatttgcaaaaattaaccatcactattccggtaaaagatgtaagtatttcacttggttttgcacaagaaagaaggcaatgtctttattgataataaaagaagaaatccgcagttacctctgaatcatgatccatgtgaagcatctcctgcacccctcctggcactatgacgcagctataaccagctttaaggtaggagtagaaattcttcctggatgcaggaaccaaccccaaccatgtccatatttgcctcaagaatggggtatagaacacctaacaccgaccaattcaccagtaaagagcatatctttatttagaaaatggattaaaacctggcctctatatccagatggatgttcgcagccacaataaatagcatatgtagtaatagagtgtcgaaagatcaaactcttaagaatgtactcctaggaaggaaatctgggaagtgggaacctcaccgcactgcttgcaagaacctttatctttggtaatggcatgaatccaacaagctccaaaaggaccccaagggcaatgggcaaaacagaatgcggctcataaccaaacactgcaagcacagcacaatataatcaccaacccagtggacagtgccctctatataaaagactccatacttttctatatattactactcctttacttagcttttagaaataggccaaaagggtttgatactttaaagattaaaaagattcaagtatcacaatatcatctttagtagttgtttctgtttagctttaggaatcaactgaaaagcctcggtatcaatcatcaatgtgattcaagaattaatcaagattccagagatggaatgagataaagaggaagctcaccgtaagctctattgggatcaaaagccttgtagtcctcgacatgtaatgtgacggggaagtacccaatcacgcacttgctgatgaacctgaggatgcgtcgtcctccaaaatgtaagatccaacaatgcggtcaggtaaaaaaacgttggcagccgaggaaatcgaggagacgaacctggcgatcttgcgccccaacctgctcatatcattgaccggcgcgaacatgaagaagagctgcgtggcgagcaccctggataatacagcgcggagaggcgagagtgagacccaagtacccaacccgtcaacggcgagcagagcgcgaggtagggaaaagaagctggaggagagatttgggtaagaggttacatggcggcgacgcggcgggggaagaggaagagcgaggcgaggaggaggaaggcgttgaagtggatggcccccagccacagcgccagcgcaaccgtggtgcgcaccggcggctgcgccgtcccccggaacaccgtggtcccgtcgtccgccatcaccgccgcctcgccggcgccggcaccgccgccgccgtaccgcacttcaccattccccgcccccatccgccgccgccgctggcgacgagagagacgtcgcgtctcgcgtcgagggatgcttctagtattgtccgcctctctctcgcgtcgcgggcgatttcgatgcgtcgtcgcgtcgtctccgctgtggctcgcgggcttgacctgtcagtgccccacgctgccaacttatagccggcgcggctgacaggtgggccatcccttggaataagggagatgagatggagtagatgggatggttgtgctgtgcgtgcgcccgacgacgaacccgttcgtgcggatcagcgcgaatcggcgaggtaagctggacgcagggttttcggaataagtttgccgataaattttagtaccaaaatgattgcgttttgattaattttattttttattttggattcgaacggctggctaaccgagtgatttctcagtgcaaaccgggaccggctgttgctgttgctgttgctgtgattaccgtgatttatctcgctgttgctgttgccgctattgattagctcagcagctgactcgcaagatgcggacatgactagacgggatcgtgtttttttaaaagaaacgggatcggatcaggaaagcgacccgcggtgttcttttgtgttggaaatgaaaatattgttggaaatgaaaataaaaatgaaaattaaatattttacgttaaataagatggtattaatgtataattaaaaaatatttatctaatattttagaataactttcgtaagaaatatattgtttggtagtttaaaaaatatgtcacaatgataaaaattttcatccactactcgtagcagaaaaaaaggggcgtcccacgcccgtactcagaccggctggttttgcagcattcggcggcgtcacaactcacatatgaaggtctgaactttgcggttaccgagtacgcagccaacggtgacgtcactgtgactgcgggacgccctgtgatttatggccgagtttagtttctaacttttttaaaaaatttctaatttttttatcacatcaaaactttcctacacacataaacttctaacttttttttcaaactttaaattttaacgtgaaactaaacacaacctatgccaatatgccatgtagcggctactgtagcaatcgataccgtgcaatgctgtcgcattgattgctcggctagatcagatggctgtggccggcacatgcatggatggccggctaggggaggaatgcagattttctcgcacaaaggtccacacaactgtctcgtaaaaatggatcatgggcaaacagatggtagatttgtagtaccacttgtactaaatctaggcgtccagcgcgcaatgctgttcgattgggtaaatttaagcctttagaattgcaggttatatatgatcatagccagggttaggtggggaaaaaaaactgtcacaaccaacaagctgttaaaccgtgttaaactccccccggtttgaagaacttcaagaattccacccatcgaaaatgacctatacctaatccttctatgggtattaacgccaatgattgttgtacacttgcacgtaggatgtctgtactagagctatgacggtactttaataaataggagtattatggaaatatgggcagtccttccggctgcacgctgcgaactaaagtactaaacttcctgaatgctcgtcacacaaatgaggaaaaggacttgtggagttcagaaggtagcaagagtgtgacacagtaatactattatgttcagctggactgcctggacctggacacaataatactatgttcagctggctgatggaagggaattcttgaagattcaaccaagaggaagaaaaatgggtaaaaacagagcgggcttgtttggtttagtaccctaccaatatattgttagtgccaaactctaggcaagttaaatgagtgtctttggattgatgccaattgagagccaaattttaaattgtggtgaagaacattctagaattgtgctaaattgagtataggcattaccaaatatttggctttaaaccaaatcatcacatttactatttaaactaccaaaacattggtatggcaatattttgatatcaaaccaaaacggcgcagctttaccaacaagaacctcatcttggaacaaaaattaatatttcgttaattcggttcaaaggttcaaaactgagtgacaggtcctctcctttccctcaacaatttgatgggctaaccagcgtgggtttgaggacttactcattttatttatttgataggaaaaaatgatattaggtaattttttaatatttgcatttttaacctgctctatgttttaccattccaaggattatcaaatggtcatttgccaacgtatctcgagaacagtagggattcgccatcgggaaagaaaataacgtttctccaacaaaaaagaattggcctgttcggtagctctaattggcagccagctgctacagtgaaatttatagaagatcaatggtagcagctgcacagccgctgtatagggctgccgaacagacccaatactatcggttatcagcgatcagggactctagaaatttcctttttggcctttcggcttacgcagcgaatggggtcccggccaaaccttgcggccggagctttgcctcctgatcctccacaccagcgctcttccgatccacgcagttggcctcacgagttatgtaccatcagccattactcctccagtgcaaccctctcgaaggagggaagaaaaacacaaactgtaattttttgcctaccaaaatttggtttatttaagaacatcgctgtctgaacaattattattccagtccaaccaaacacatcaatagcagactcacgctaccggctcaaaaatggcaaaactctccaaagaaaaaacacgaaaaagaaagccgtggggttgcaacatcactgtttctaaccccacatgtcagatgacacaagcgaatgtggatttagtaatccatttgactcagagtggggttccctggccagtggaagacgatgtcatgatcgccaatgtctcggtcacagatgacatagcgctcagcgctgccttgagaacatcctgcgagcacccaggcttcacgatgcttttcacctgcgcagcaacaacagttagaatagacaccaacatgtgccatttgtccacaggaattcagattgttcgatacgaagatcgatcaattattgggattatggaaagtaccttctccaagtattcctggagtttcttgatcctgcccatatagtcttgatcttccacgcacagtgaaataggctttgaatcagcacctgctccttcgaattggagtggtcctgggtttctgtagatgtcgtcgattaagaagctggtagaattgttcctcaatagcctgtaaacacaagtttgttattgtcaatgagattatgcatcttctttagaccaatgacagcaactgtacagcgatcgaatataagatgggattaatagattgtgtacacacttactcgaatgctttgcctttcaagtcgacagtagccatatggacagcaggtttccctatttgagtagccgcaggaccacgtgaccatctcttcacggtcatcatagactaaagggaaaagaattgtgggttaggtgttcccttcattcatatcatactcatctaattttgccaaaagggggtgcacagtagtaatctcaccgaaatcggagccgcaccacatcgccatttgttcgcaggactcttaagatttgtcacagtagccatgtaaccattcaaaccagcagctaagatgtggtagcacacgtgcccaagaacctgaagccaaacaacatacatataattaatcaacagcaaaataaaattgctttgtccaagtagaaaggtgagctgaaacttgcataggcgtaatcgcagtcaaactttgaaggcagtgaacccctagcttggtagccaaaaaagtgacagatcgcattgaatttctttcctttgtaagtgccttccttctgcagagataccaagaacatcatgagccaatataaatattactcactccacatgtagactgagacatcagtaatgcctcagaaccaagagacagttacaagaaaggctgcagaaagcataccatacgcctgttcatttcatcctcaactaattgggccaaaagtttttcggtttcaatctgcaccggtaaccatgtggaggttgtaatcagacataatgaaatgaaacaaaaaaagcatacgcaaatgactgaaagtattgctgcatatactataatatacctgagaaagttgagctgagtcatcagattcaggatggagaagcagctgcatcagaaaacaacaatgcaatatcagagacctgatgagagttatgaatgtccaagagttgatagatgagtatcagacaatacacacctgcttcctaataaatgggggcaaaaactcaaatagtgcagatgcccaaggtgaaagctgtgaggagatattctccatggaaacacctttgccgtgaagcccatgaatttcctacaattacatagatgccacttagaaatgttgtaaatgaatagccatatggcatgtacaaacttacctgaagcaaagcatataattcaggaatactctccacgagtccctccggaataagtacaactccgtgatacttatctgtgcaacaaatataaggttaagtaaattcataaattttcacaaaatggcatttcattggtgaaagcaaggttacatgagcatatcacaatagaaggcccctacccttctcagcccttgcctgaactgcatcacatatctgcttcgtgatatcaaagatggtaagttttgatgcagcaacctcctcacctaggataacctgaacatatgatacaggttcaaacaaatgcaagaagaatttgcagcaactcaggaagcataagcgaaaagttgaaaagtccaaaccatattcggatgtgattgaagagcacactccaatgccacatgagaagccttccgccccatcatgcgaataaagtagtaatactgccagaaagaatacaaccacaaggcatataaaattgttacttttgtaatgtgaatttgtaaacaggaaggctcagcaggccttgctggaaaagtatgtctactgaataaccacgctgagagaaatactgaagaacaaatggaccatggaaccccaagaaaaaggataattcagttgtctaatggacctaggcgaatttgcattgttatcaatcagtattggcatcctttattgcctatacaaagattgtgtacacctgtgtgtgaagtgtgaacctcccacataggccgaattaaggagtgaaccgcaaattatagcccgtgttctatatttgtttagctctttctgtactgggacttaacagtatcaattcagagttttttttactgtctcaattcaatttgattatttaattctgagaaaaaaataaaggaattgaccatagctaaatagtatcacagacacgaaagtacatccaactaaagaagaagcggatcaaccatattagatattaccttctcagccgaaagagcatcggtgcatacattgcttataagttgtgagttcacctgttataataataaataagttcaacaataaataaaaattgcaaagtggtaaattaaatgcgtagtatttttgaatgggcaacttggaaagttatccatagcacaaaaaacacactttcgcatacataaacaacctcaattgacaaaaccaaacatgcctaacaggtcagttatgcatcatatagaggtaatggaaggacagtaaaggtaaatggagccccagcatagtaatgtaaagctaccttgcatatggtatcaaaaccaacggttgtctcaacaaactgattcttaaggtccccattcaaagttacaggaacacctacaacctgttcaataataaattgtgtcatgccatttacaggcaagtaaaacatacacttgcaatggaaatagggaatcaggaaccaaggcacggactgcaacaagaaaagggaattatgatataccttcgttgcacacttagcctcagcaaaagtctcagcaagttgagcagcatccgtattggatgtaacaccttcagaaaccagaaattaaacagatgttaggattaaaaaaaatatacacaatgtagctatttagtagactaatgccacaaagcctacctccaatgattactaaagcatccaacttcaaagcctgacaactagccatggcaccattgacctgctctgttgttctaatttgatcctttgtccggccaagcatatcataaccaccttggtttttatatgaagaaagaacttcgtcggtgatctccaaagttttctgtgcgagaagaccatcacttccacctgtttcaacaaaagaacgaaataaacacaaacataagaaacagttaaagaaaatctgtaagcattagctccaagtgttagacatgttcagaaaagcaggcatgagagacagaagcccgccttggggggattcatgcacaggatgccaatcacaaaattaacacatttgatttggattagacacttaagaaagataggtactctgtccaagatcttgtagcaaagcatcactgattgtttttttttttttagtataggtatgtcactgtgttgttaatttcattaagtggacctagcaaagttcggttgaagagctttagatgtcactacttatgtgacaaaaatactaaatgatgtattgatgctatacagttgtgatcacctgctaaggtaatgaaaacaaataaaatataacaaaaatgctgagttaattcaaattaaaacactggtggctgctaggggaagtcgacaacacatagtgtgctaagtagcttgtgaagctatttaagcaaacgctgaaagtctgattggacgcaacaagcagacatgagaacaaagggaacgaactattaatacattcatagttgcatatcaaaggactcaccaagaaaaccaataagtttgctgtttgggttgtgagccttaattgcctcatggagtccccagatgacattatggcctcccggggactgccttccgcagaaaacaacaccaaccctgcatccaaaacaaaacaatcagatgtcttatatgtgcaggcagtgagaggcgaagacaaataatttgatgtaatttctctccagcattctcttataatttgacaaatactttactactagtatttggtttctttttttcaaaacagtttcttgtcttgcagcagatggcatatcaagtaaaaaaattgaatatcacaagtaaaaaatacatatatacctgacaacaggatgctctgatatgacagtagcatcggggacattagccgtcttccggagaaaatgggccaggggctgcccgtatgtgtgggggaacgcgtggctgatcacatgagcgcctgcaggatcagcagcaattgcagcgtcaccatactccactctcacagtggtgccctgatttacatggagtgaagaaattcagagcgtgaattcacaaaatcattcatccaccaccaatcacacgcacgcgagaaaatcattcgcaaaattatcatgaattcatccgatccagccaccagtcaaacagcataactaaacaggagaaagtcttacgatttgatagcgattcatgggtcaccacaaaagtaaacaacacaacacaggaccgtgaaagctagtccaaaaagaaaagtccatggttgctgtagacgaatcaatccatctactgtttattccaagttgctacgctccactactaaactcataaataaaacagcaacacgacaataccaacacggcaaaacgagctttcaaaaaaaaaaattcccccgcgcacgcagcctcccgcaagccaggcacgccggttggatctactagtacattgctagacagagccctgcacctcgcaggcgaggtccagcacgattcagatccaatctggttccccgaaaacgagtgacagactgacagctgatacacgtaaacctatggcctaagacccccgagaaatcaaatcggaagcagacgaacagtatacacgaccagcgccggtgagatggactgatccggacgccggagcggcgcgggatctggcgccgcgcggtccggaagcacacagatctagggccgggaagccgcgccagggaccgcaatgtcgcacgcaggggaaggaggattagcggcaatgggtgggtgcggacctggaggcaggggggcagctcgggctggtagagcgcgcgcttcttctgcacctccgagagctcgcgcggcacgccgtagtcggagtccatcgccggtgacgcagcgcggcgcggcgcggcgctccgattcgttctgtgctggtagcttgggggggtgggctcggggcttggtgactggcggcgactagcggggacgatgtgccgggggtgcgggaggatttttgttatatagtcggaggcggaggaggcggctcctcccacaagtcggcaccgcacgctgccgctgccgcgatgccgatgcggtcgcgtcgggtccctgccgtttggcgaattgcgaatcgggcccaccaccggatttgtttcactactaattgatgggccctgggagttgggccgtaggatcgcagttacaagtgggctcagttactggagctattagggatgtgttcttttgccggctttctcaactcacattcctcgttttttcacatctcgaacgtattgccttttgtaaaaagtttatatatgaaatttactttaaaaaatcatattaattaatttctcataaaaaataaataagctaatacttaattaatcatacgctacaattcgttccatttgtgtgcaagggattagttcccaactcattccaacgaacgcaacctcgcattctcatcttttcgattatacttatcaaccaaaatttaaatttttcaaccttaaatttgaagttgattttgggaatttttcatcatagtttattttccagcctttgcttttggattgttgaaaacatgtatataaaagttttattcacaattattttttatttgcaaatatgccgttccgttttttcctcaagtatgccaaacgatggggctgcccttgatttcaaggggttttagtttggtatttttatcgctattatttatcaaaagcaaaagaagtctatcaaatcaacccacccaatagcattggaaaataatgcctctatcaggtaatctaatacggtataaattcgatgtagataagattgtatatgtggaatttttttcaccaaatccaacgaaattcattagagatggctcatgtaaattttagagaaaagttagcaacagcttcaatatttttggacacatgaaacaaataatccacaaacaatatctagtgaaatagctgaaaagaacatggaccttaatattcgatgatagccagcaacaaaatttagaattcaatagtccattgggacgaggaatcaaatgcaagcataaaaaatttgcttaaggacaagcattgcccagaggcacttataaacattactatgaaaatagtaaataataatgttaagaaactaatcctttgttttccaaaaaataaagaagttaagctttcatttaacctattttcatctctctattttgatatactctgcttccgactaaaaataaacaacaaaacaaaaatctccggtaggtcaaaccaaaataaaccagcctacttatgtcaactactataaacaatactattatagcagatccccaagtcttgctactgattacagcaaaattccgttgtcagctcggcattgagcgtctgctcacacaaaaacttgcttctgcaacaaaattgtctaaagcctgcatgaaaaacagaatacctgatatcaaagcatgacgagcttaatttgaagcaagggatagatgcaacggtgaatcacaaacctataaagaattccagaaataccaccgggccagtggtatctgcactcaaaggaaactatctacatatcagcatgcccaaatggtgcacgaacaaatagttggccatgaagcgtgacaacggcggatgtttgatgaggatcgatcctcaatggcagattgaccacctgagaaagagtaatcacttcatgttatctgaagagaatgcaaacgtgctcaaattagtattcaaattgctgctatcaccttcttgaatggagtgatcccccaaggattatcaggctgctctgggtccccagttataaccagacgcccagcaggatctgactgaacatgcacctgcaccatttagaacaaaattcaacaattcatttcttctcgcaggtagtgcctcagttcaagaagtggaagctttttgtttgttacgcacaaattaagtcaggtatttattttaggaaaatggaacagtttgaagtgatgcgttcaacattaaagatattttttcacctcttcgcgtagaagtccaggaaccagagcatagatttcgaaacaatctttctgcaggaaagaaacagccaaatgaagagatttctcccgaataaaaatggcaactcaacagaaaaaccagctcatatgctattaggatttcagaagagcactgaaaaacttgtctgtaatatcaatgcaccatatgagacttacagtctgtcgtacattaatcttcacccactcggcaggttctccaacatcagtgaccattgagtcatccctgaaattgagaatcccgttacataaatacaagttcaggcttcataggctaagtatccaaatatatggatttaaattctgctgagaagcttaattgaacaaaatgtaactgtaatttttaggattttcctataaaattttgtaatgacatattccgtagctaaatccaagtcattatcagccaatgctatataaccaacagaaaggaaaggaagtcttaactgtgatttgtttatttttgtacgagacaccttgatagcacactctggactagatgctttcttcctcttgagtactcctaaatgtgtcaaaacaaataaatgagaaaaaacaacagatgcactgctgaaagaaaacttatcaaacataccaaatactttaggttcttaccacgacttgaagaagggactgaatctttttcctgtacaagtttgaatcttttctgattaaatagttggtgacttgaaaaggtacatgtaaacaaagagcaagatctttttaaccttcaacatttgatctccatatatgccattggtaaggagacggtgagcatgccaaccctgcatagcacgcgctgcagaatcccttctaactctggcagaagatgattgattcataccaatctgcaaggcagtaaacaaacttgtcaagctagctaaaactagtagtttacacgcatcgacaagaaaacacttttggcaacaacgcaacaccacacatcttgatggaaaccttaacaaatggcaggcatcttaaatcagttattagtgcgtctatgtcaataaaattggatccataaccaacactcaattttcagaaggaattcagtgactaaaatcccttggtctttccggatataaccagactgtgtccttaattcagctaggttggtgtaaatatcacagctttcatttatacatgactaatgaggtgcatgctaacaaaggcgtaacaccattccataaacaaatggatataaaaaaaaaagtaaatcccctcacgcacattgtgaggaatgctagcatacgggcctgatcgacacgaaggggtatgcaattttgtttaggcttggcattcactcaggaggcccctgacaagcacattgattatgctttcccttctcttttccgttttattcttttggttttctatatgaaagttgtgtgctccaaagctttagctcgagatgaaagtctccatgtgaaagttttccgatcaaaagctctttagtctccaataggaagcttttcaatctctagtagaaagcttagtctccaaaagaaagttttcagtaaccagatgaaagttccaggtgaaagttttcagttccagatgaaagttgtccaatcaaaggtttttagtagcatctttttttttttttgcaatgagaagttgaaagtttcccttttcgggatgcagaacaagaagggctacaaattccagggaaaggattaggggagactatgcacgaaaagctataaacaaatgtgccatgcccatgcgtgactgtgactggggagttcaagaaatgagatgcaagctgcacgagttggggacacaagaactggattgaggccttctgggtgctctcgtcttactattcttccagtgatgattttttttttaaaaaaaagtcctgcgtggctgcatcctgtccgtaactgatcatgacttttggcgcaggcgcgaattagacaggtcctaaaaggacagcatgtgttcatctaattattaaagatttacacaaatagggtgaatcccgttaaattgtacagtattgaactaaaatataaactgaattaataaattagagctcttattaaaaactgcactattagaacaattacctcacggccagtaccaccaggctgtggtaaagcagacaatggtacttgaagctggccagttcggactttgtatttttcatactcgagaagtgcctaagttaatgagaaacaaaaattaacaaatcaagcagaaaacaatgcataaatatgggatggaatctaagcttacaataatgcttctgtactatattccatccaaaacatgcatcagttagcatataaataactaagaaaattaatgatctaaagaattaagagtaatagcatctgaagaaagcgcaacagtttcaataaaatgatgaagggacgcatcaagtaagataattgctcgttaaactaaaagtaagaagtaagaacattaaatattccctgccaaaaaaggaagcaacattaactgacacgggaacccctaaaatttttacactaataaaggcagacccatcattttagatcaattcttatgtttgaaactaagaactatactaataagtctaacagttttgcaactaaaacttacaataaagttgatgcgatatgatactgattgcaggaaaaaaaatgattgttggtgaccatttacttgtgacagaaagaactgaaaagggggaagttctcttgtgacaagtacagaggcaaaagaaaatcatgcagcaaatgcatcaccttctcatagaaaattcggaacgaccacgatacagtagtgcacgtcctgcaaaggattacggcagcaacaaattactcacatatggaagtctttttttttctgcgaataacatgttctgtgaaaattagaggcttactttggcggcctgaaagtctctccaacttgacgccatagtttacaaattgttacctgaacaagcaaaatatttaactagaataaatataactcaggtccttgcagctcactaatcactgttgaacttatttgatcgtgatccacccggacatatgtcaccgaaaatattttactctacagtagcagcagcgagcaagctagtgacaaggagtcgaggaccatacctgctcatggcctcccaggtgggcaacctgcctccataacctggattggaaaaggaacagagcaagcttagacgagaagagatgggtgtactcgggttgaggagctaacagaaacgagaggtgtagaaagacacgcacttgaggcagttgagacctttgccatagaacttgggaggcttgaactcgaggccgtgctccctgtggaagcgctccagctccaccatgaacgccgcctgctcctcctccgttccagagtcgtcaccgtcgaggaaggggtcgggctcagcgggctggttggcgcagcccgccatcacggtggagctctcgccctccgccttcgcctccgccctcggcgacgcatcgggggtggagtcgtcatcgtcatcctcctcatcatcatcctcctcctcctcctcctcgccgtcgtcgccgtcctcctcgtcatcgccatcctcatcgccgtcgtggccgtcgtggctcatggcgtcctccccgttcatctccacccccctcgcccccacggcctcgtcctccccctcgtcgtcctcgcgctcacggccgccgcccgcccctgcattgagctccacccgatccagcgagcccgcgccctccgcgtccgcgtcgctcttcggctcgggggtcgggggagtgccgccgccgccccacgcggccctctcctccgccacgggcaccgcctcctcctcctcctcctcctcctcaacctccacggcacggcctgccgcctcctcccctctggcctcctcggcggcgcgcgcgtcgtcgtggtcggagccggagccggagccggccgtggcgccgttcatcgccgcggcttcggcagggcaggggagagggagagggagggaacgggcggctgctattttcgcgggctgcaccgaggcgaccgcgagagaggggagaggagaggaggggggagggaggcccggagggtgagccaggggcggggggttgagaggtggcaactggcacgcaatgggaaaaaaaggatggatctccacggcttgcgagcgagggacagattgttcctacgcctactcccgccagtggtgggccgctttgttctctctgcctggatgggccgctttgttctctctgcccggatgggcctgatagactattgaactccaaccgcgtgatagaataagttcactttaggtccctcataattcacgttgagttcgaatcgtgtctttggaccgcagtaccagatataagtataacacacgttctttatctttcaaaacaaacgaatgtagtcccaaggcagctttgtaggctgtgttaagctgacctggaaccaaaagcaaaaatagaaaataaaaaaaaatcatgatggtcctaaatattgaaacaacatcttcttcctcccctctctctcttcctcatctctattcaggcctccatggcacgtgcctgtgtagggagaagggcggtagtcggcagagaggagctagacggtggcggcggcatcaccgagctctatcggtgacgaagacggggaagctcaggttgatgcttaggttgtcatttttgctgtcgtgagggcctcaggcctcggcgtcgtgaagataggagagaacataatgggaagatatgggaaaggagagagagaggctaggtgtcatcacctttggcgacacaatgaggggaagcgtgaacttggcgagaagagtggcgaggctagggagcatggcgtcgccccaccaccacgggcctcctctgttcccgtgtcggtccacccgacctctgaatctgtgatttctactttcgaattagtgtagttaggaattagttgttgatattcactaaaaaaattcgaatgacttccgttgtcttataagatacatattttacctcgattttcgttagcacgtttttcaaactgctaaaacgatgtattttgtgctaaaactttctatgtgaaattgttttaagatataagataaatccatttctaagtttaaaataattaaaactaaattaaccatgtgttattggctttctagttttacatgtccatacttaatattcgtcttcatgggatccaaacagatcatgttcttttgccattaaaaaatatttcactaggggtgcaagcaggcttgtccgcgaacccgtttataggcaaaattagtgggtaacccatggatttgacttgcgggttatctattaatttgacctataaatgagtttatagatcgacccacttgcatatctagatgcggcaagccggaccacgttgcaaaaatccatgagttatcatctactcccatccgtacatgtaaaggaagtcgtttaagacaatatttaagtcaaaccttgggaatataaatcataaataactctcaagttgttgagtttgaaaatgtaaaaattatatgaatagatttgtcttgaaaaatactttcacaaaactatacacatatcacttttcaataaataattttatagaaacaagaagtcaaagttatgtgtttggagaccgtgtcactgtccaaaacaacttcctttacgagtacggagggagtatttgacctataagtgaactcgcgggttgacccgcttgcatccctatattttagttttttcaaactgcctactggtgtattttgtgtgaaaactatctatatataaattgctttgaaatgttagataaaaccattttctaattttgtaataactaaacttaattaatcatacgcctatgatttttttgttttccgtgctctaagttcatcttcattttcaatataaacgaactactccctccgtacttgtaaagaaagtcgttttggacagcgacacgatctccaaaacataactttgacttcttttttctataaaaatatttattgaaaagtgatatatgtatatttttatgaaagtattttttttaagacaaatctattcatataatttttatattttcaaactcaacaacttgagagttatttatgatttatattcctaatgtttgacttaaatattgtattaaacgactttctttatgagtatggagggagtacaagctactacgtagtttattgatttgttcatttaacctgatgactgtcagaattctgaaattttataacaaggtccttcagacttcatagaaaacaccctgactatattcattattacatctcacatagcgatacgtgtttccactccttgcgcgtcgtcgtcctcgcccccacccagttcttccaaacgaaccaaacagtcaccacagatccgagctccccgtcctccccggccaccaccccggcggcgaccggacctagcgcctcccgaccgttcgcctcgcctcgccgcggcgccgcgggtggggcggccatggaggactacccggaggagctgcggacgccgccgctgtcgctggtgtccatcgtggggtgcccggagctgcaccccgcgatctcggcggcgctgagctccaggcagccgcccatgaacttgctcgccctcccggacttctccaaggcctccatcctcgctcgcaccgccaaggcccgcgacccgctcgcgccgccgcaggcccccgccgggatcctgaagaaggactggctcctcaagcaccgcacccgagtgcccgccgccgtcgccgcgatgttccgggccgatcaggtctccggggaccccgcccagtggctccaggcctgctccgatctcgagaacctcaagtacctcctctacatctcttgcatcgttgatcccaaatagatgtgcgcataatcagaactcataaatatcacccctgcaatgcaaattggaaactatcgacctcttttggattaaggacttttctgaagtatcagcagtgtataagcagctagtgtagcacagactgaattcgcaaataccaagtaatgttcattttttttttgcaggtctgtgattcagggaagaaacactaaattagtggtgatccttgtacagagtcaagctggtggtaagcatcctctcgagtatacgtaatagtaatacattttctcgctgaacaagcaattagcactttagcttacgaagcttagctaaacaatctgcaactggccatatctgcaacagcattagatctgttattttacgcatgtcaatgcctacactctgcgtcatgggaatcgagggttgggcttgggcatgggccttatgataacagacccttatactcgcttgatatttgtgtcgtcaaacctaaccagatagccaataacattttgcagatgaactgagcgaggatgttacggttgctctgaggaaacgtgcagaaattgattcaaagcacctggttgttttggttgagagagatgaaatggaatggaccaaatctctcaacaagtatgctctgaaacttccccttaatcttctactgttatatttcttttttttttgaaactatcttttgctcttttctttttcatgtgttccttggagttatacctactaacctgcattatgttctgtattgaaaggttgacaactgtttttgcggagttatgtacgacatactataaggatgaaggacgaagggtcaaagctcgcatcgagaaaaggaatttctcatctgttgagctgagcattcgctactgtttcaaggtaggaagaggaatctctctctggttcaatttagcactgttagtcattcttaatgcccgtggtattgggacaaaaatttttcttcacatgcttggtaaagtcagtagtgctaatgacttctcactactctaatttttattttttttgggctgcattcctctgatatttctgattctaacaccaggtcgctgtttatgcggagtttaggcgggattggcctgaagcattaaagttctatgaggagggcattcgtgttctgcgtgaggtgtgaattggatccctgttccatgtttgccatagaccttaaaagactgataattaagtgaatccacacctgacatactcttttagaagccagattattgtgacactgaactcatgagtaaataaagaaagacagctatggttgctatccatccaaatgtcgtatatatttgtaatgctgaatatactcttgtgcacgtgctacttttaaaatattaaatatagaaaacacttcatgaggatctcatacctgtctagcattaaagataatttatccaagctaccactctatcctgccctatcctctccatgtgtgtttgcatcttacattacatattgaaagccttcaagattccttactgttttatttttccgacactattgcttaagcagtttctattggctttacaccctgcattgacaattgctcttatttagatgataggaacttcaacaagactgcctccaacacaacgccttgttgaggtaaaagcagttgctgagcaatttcactttaagatatcaacaatattacttcatggggggaaggttgtgggagcaatcacatggttccgtaagcatatcagaagctatgagcgtgttgttggatcaccagaagttgcttttcttcactgggaatggtttagcaggcagttccttgtctttggtgagctcatagaaacaacatctacaactgttccggatacactatctcctcgttttggcactgctgacaacgcactgaccgagtgggaatttcaaccagcttactactatcaggttcaacctctccctacacagcactacaacagaggatatttcattccttttacttgaccacactagtgatctttttatgatgccttcccttctggcagttggcggcaaattacttgagagagaagaggtatgccttagagttctcttcatcaagtgtaagccttaccaaaggagtcaatggattacctgagtcagtaatgccttccgtatatgttggtcagtatgtacgcttgtttgagcaaggagatacagttgcggtgcttccgtaagttctttgacccttagttacttttagatgttaacgtaatttttatatgactacttatatctgacactgtgcttgcagcctttctgatactgagtataccagctatgctttgtcagaagctgaaaggtttcaagattcctatgagataattgcattgttcagaaaagcttatgaatcatttcggagcctaggtgccacaagaatggcttctgcctgtagtggtggaatggccattgagtattatgcagcaggggattttagtaatgcaaaacaactttttgatggtgttgctggcctataccgtcaagaaggttgggccactttactttgggaaaacctaggttacttgagagaatgtgcaaggaaacttaagtctctgaaggactttatcagttattcacttgagatggctgcattacctttattctctggcagtggacagggaaattcagaaaataaaaggaaaaatggaccagcaggatctcctaccatttccagtagagagcttatacagcaggaagttattaatatcttggaaggaaagcatgcatcggagaacactgatgatgaatttgatcttcatttgatggaagaatctactcacctcgatattgatcaaataagtccactaaggatagtgtttctcgcatctgttgcttttcacgatcaatctgtaaaacctgattcaccaatgcttgtcagtgtctctctacagtctcatcttccttgtccagttatgattgataagttggaggttcagtttaaccaatccgactgtaactttgttatagttagtgcacaggaagattgttctgcatcaaattcacatgttcatgatggagctgttcagactcctctgacactgttcactgataaatggatgcggttgactcatgaagttaaaccaggtatcagttatatatattatatatagtttatttcattagatgttcatccacccgctctctgcacgtattgtaacttgtaaatgttttatttcttgaaaagtaacctgtaaatattgtcatattagtatcttaatctgaacatacagaaacaacaggacattaccagtctcatcgttttgcgtacaaccgattttaagtcatgacacttattagcaaccaaaacataagttgcgggtaaaactcttttatatgcgttcttagcgacttaaatgccaatgctggaaaatgaactacgatgaaaaaacatcaaaatcaactataaaattaagttctaaaatccaaattttggctgtggctgatagattgaaaatcaaaatttaagctttattcggcatttgctgatgttaacttttccccttctgttagtcctatcatgaaataacaatgtgagtactttctgcaggacagagtggaaagctggaatgtttggcggtgaaggcaacaataagtaaacgtcttgtagtttgctgccaagcggaaagtcctgtttcaatgggagaattttcattgtggaaatttgaggaccaagtagaggcattacctatgaaggacaatgtacttgctttttctgggcagaaactgatccaagttgaagagccagatgctcaagttgaccttgtcttagattgtcctggtcctgcattggttggagaattatttacagtcccagtgaccatattgtcaaaaggacacgcagttcattctggtgaactgaaaatcaaccttgtcgatgccaaaggtggaggccttttgatgagtcctagggaagcagaagaatctgaaagtcatcatgttgaacttcttggtgtctcagatgtgaccacggaaaatgggtcaaaggaagaagttgatagcataagaaaaatccagcactcgtttggggttgtatctgttcccacattatatgcaggtgattcctggtcatgcaaattggaaataaaatggcatcaagcaatgtcagtgatgttctatgtctcacttggctattccctggactcgactgaagaagcagcactgcacagacttaatgtgcacagaagcttgcaaattgaaggtaagatccccatgatagtcagtcaacagtttttgagaccatttaggcgagaacccctgttattatctaggatcagatcctcaagtgatgatgataaaaaaagttctcttgctttcaacgagtcaaatatgcttattttaagtgctagaaattgcacagaggtacctttgcggctacacacgatgactattgtgtctaatgatgatggaaaacaactctgctcagtgcaacagatcagtgggatttccaatgaatacgcagttattgctcctagtgaagaatacaaaggaatattttcagtgaatccacatactattagtccaagcttttttctaggtgaaatttgcctgagctggtcaagagattcaagcattggagagagtcaagatagccgtgttataatgaaagaaaggttacctgaagttcatatcgaggagccgccacttgttgtgaccatggagtgccctccttatgctatccttggaatccctttcacttttcatgtgaagatctacaattcaacatccttacttcaggaaatcaagtactctcttgttgattcccagaacttcgtcttctctggggctcacaatcatgctgcatccattctgccgaaaaccgagcatattgttagccataagcttgtgccgcttggttctggttcccagcagctgccaaggataacaataacttcagtgaggtattctgctgcactgactccttcagcctcagccgcaactgtctttgtatatcccagcgagccgaaattcaatttggaaaagggctattcgtcaactgatccgtgcgttagctagacttgtatatactcagatactctggcagctcttagctttgttccggagaagcgaggtatgctcctgaaaaaaacacgccagttttatcttaattcttgaataggcctggagcagattctgttggtgaacagcggttggatcattgcaaaagttttggcattcttttcaggtgttgatttcgtatacctttttggattgaccacatttctgtaacttacgatttttgtaccgttgattttggctaaggataatcaatcatacacacaagacgggctggtgtaaattagcaccccactagagacaagtggggaataaactagtcccatgtctcccattagaactcgagaaattttcttgtcttctgctcaggttctcatatgcttcttacgattcccttgcttctgtacactttgttttcatgggaaaaaccttcaccaacaatgctcttcggtgcttcattcgtactaaaatatattaaccaaataatgaattagatattatataatactacagtctaacactacatactactaatagtagtattagggcctgtttggtacaggtacagctccagctccacccctcctggagctggagctcagccaaacagtttcagttccaccaaaactgggagtggagttgggtggagttctctcataaaatgaactagagttgtgaagctaggtttagacagctccacaacttcactgcagacctaactcctgaagctaaatttaggagttggagttgtaccaaacaggttattagattgtatagtaagagtttattatttagcgactctctatttatagattagtagtagtaatagtattagatagtgtggtaagagtttgtttagcgaatctgaccgtacgaatatccgtttagatagtattagatatcagtcaattcaaatttgtacttagtatactagtattccctccgtttcgaaatgtttgacaccgttgattttttagcacatgtttgaccgttcgtcttattcaaaaacttttgtaaaatatgtaaaattatatgcctgcataaaaatatattttataatgaatcaaatgataggaaaagaattaataattacttaaatgttttgaataagacgaatggttaaatatgtgctaaaaaattaacggtctcaaacatttcgaaacggagagtatattttagaaccgacgtttaatccctgagagccagccgttggctgtgtacttcatgcctctctatgacaccatatggtatcggattggtgatagtaatccgtcgcgttgcagcggcggcggcgcgttccatgctttctccctttttgtttttttttcgtcagtttttgcaagtagcgctctataaaaatctcgcattatcttcttccccaatttgcgccgctactagtaggtgctagtctcgcctcgagcccaaatccagcctgctcgcgtcggccgatcgatcgatcataccacgggccgattcgtggctcgcgccgcgcggctggggtctaagctagggtttacgctcgcgaaaaaaaaaaagaaaagtgttgagcgaataatttgctcctagacctttgctgcttctcccctgtcgataaagccgaccacactgctcgcgtccccccgcgccgttcttttcggagattccgctcgcgcgcgccgccgccgccgcagccgcccgccggggagcccgggacgaggatggaggtcgtcgtggcgaggcagccgaaggcgaagaagcagataaacctcttctactgctccgagtgcgaggagctcgcgctcaaggtcgccgctagctccgacaccatccatctccagtccatcaactggaggtacgctccccgtcctcctcctcctcctcctcctcctcctcgccggtttcgtggagtcacctgattcgctgattcgcttccgccgccgccgccgccgcgcaggagcttcgacgacgggttccccaacctgttcatcaacaacgcgcacgacatccgggggcagcacgtggcgttcctggcgtcgttcagctcgccgtcggtcatcttcgagcagatctccgtcatcttcgcgctgcccaagctgttcatcgcctccttcacgctcgtgctgcctttcttccccacgggctccttcgagcgcgtcgaggaggagggcgacgtcgccaccgcgttcaccctcgcgcgcatcctctccatgattcccaagtcccggggcggcccgaccagcgtcgtcatctacgacatccacgcgctccaggagaggttctacttcggggacgacgtcctcccctgcttcgagaccgggattccgctcctgctgcagcgcctccggcagctccccgatgctgacaatgtgcgtagcaaggccaccggtgtcctactaatttctttcaagtacccaattcgtgttgctactgctgacttgtgtgatttgtgtgttgcgcagatcaccattgccttcccggatgatggggcgtggaagcgtttccacaagctattgctcaacttcccaatggttagcttcttgttttgtgtgaatgaatgaacatgtcgaaattcggttatgcatgccattgtggaattgctcttttttttttctggttgaaagactccgagtttttactttgggctgtttgattataaggttgtctgcgcaaaggttcgggaaggtgacaagaggatagttcgaattaaggaggggaatcctgaaggccggcatgtggttattgttgatgatttagtgcaatctgggggaactcttagagaatgtcaggtatcaacatactgtctgtggctttgccatgatactacaaagtagtgcttcagtgacttaatttttactaatgttggattttcttacttccactttagtgggagaggccaagagggatatggttttttgctatctttgtttttagttgtctgacaaagagtaatgcctcctataatatacgtttcacatattaattgccaacaggcagaggtcctgaaaaacagagattaattacatgcccttgtaaaacctgatcttagcaaagtcagtcacatgcttatttttgcattttcattttttagtaggcttgatgttcattttactccatgtaattgttttaacacttttgaggacgtactaattcataaactgttgatgggatatgctgctttatgttgcatttctcattaatgcttctttgtctaattattttgcagaaagttttggctgctcatggtgctgcaaaagttagtgcttacgtgactcatgctgtttttcccaagcagtcgtatgagcgcttcactcacactaattccggtaattcgtgattctcttctctttctacctttcagccactcaacttcagttctcacccttttttttcccactcacagctgggtcagctgacaagtttgcgtatttctggatcactgactcctgccctcaaacagtgaaagccatcaaccaacaacctccatttgaggtgttgagccttgctggttcgattgcggatgcccttcaaatatgaactttgtttttggtaatgggctactcccatttttcctaaatgttagagttcactttcagctccagtaaaaacaaataatgtggagtgagttatcttaattatggctttggcctgacgtcttcataaacatctcaatatgtgatggtaaaataaggcatttgatgctcatctgttccttcttgagcaaagcgcacacaatcactgctttatttcctgacatgtatactactggaggctgagcacatctgcacaagtgctcgttttttgtcttgctcccgaaaaaagcgcttatttctgtcttaatattgatatgactgtttattaaaactcatgttttattctacattttgagttcttatagcaacacatgctggttgattagttggtactacctctgtttcacaatgtaagtcattctagaattttccacattcatgttgatgttagtagattcattaacatcaacatgaatgtgggaaatgctagaatgacttatattgtgaaatgaaggaagtatgttatttgggaagatgaattacctcttcaattcgttgtgcgttgtgttgtacgacagtgcattgtgtgctataggatggaatggatcacttcttttgaagacatcatatagatagctgatgtatagaaaagtggagcatacgtattctttccttctaactggctcctagtaaaagttgcataatgttctatcgagataattcatgctcctgacaagtaaaagtagaatagcctggtaatattttttcattctccgattattggtctggctcttttcttttctttttttgaactcatgtaactttatttaagtaagagaagtaacacagtacacgagtacaagtttgcatacagtggaggacactggaatacaaccaggtttgcagaaaagccccttagaactgggcaaattacacttgagcttaataaagtgcagaaaaggactttaaaaatagcaaaaagcaatggagtcctttcccccttttttgccttcaaccccaacgacgaaatccagaaacttgactctgacggtggaggatgcgctgcaggagattgaaccaacatgctgtcccaaacggggccttgcaaaggaggtttggatgttggaattcacataataatatcagcaacaacatataagaaattcgccggatccggatccggatcagtgaaagaaagttggcttgcagacaaaaatttcaaggatgaaccctataactattccactggcaggatgaaccctataactattccactggcgaaagttggcttgcagacaaaaattccaaggatgaaccctataactattccactggcaggatgaaccctataactattccacttccactggcgaaagttggcttgcagacaaaaattccaaggatgaaccctataactattccactggcgaggattagagagagaacgtagcagtttgcaaagaaaactgagaggcatacccgatttataggagattgagaccatctcggctagacttggaaatatcaaacgccttggagaaaaaaaaatccttcgctggagaagtagcagaggagaaccagccgaggaagaaattcgtcgaagaaatgaaagttggtcgacgctacctgtgaactcgcagatctggagggatcccgagtgatgactagaagaccctgagaacaaactccagagctagctccagctgtgttcatcttgctccggactcaaaaaaccaactacacaacgggagaaccccgactaaacaggaaaaacccgactaaactaacctaatactagggggaaggaccggacccctctccctctctccgccgacgacgaatcatcggaggaaaggaggaaaaggggccgaacaagcgacgatagagctgtagcttgaaagcggaaagtatagatggcgaaaaggtccgaggctcgacggtccggcccacgacacgacattttggcctggcctaagcacggcacggcccgacggggtagggcccgtgccggtccggcccgaccgccgggccgtgcctgggcccctcctccggcacgttgggccggtagccaggcccaacacacaatgaaagggagtaaaaatagacatattatatgccacggtccaaagaatagggacataaaatagacttattttagctatatatatgtcagcccaaagaggagggagggagtatgtcacagcccaaagaggagggagggagaatagacttatttaaaaaaaggcacgatgggccacccgtgccttcgggctggcacggcacggcccgactactggtgggttgtgcctaggccggaggtgcggccgatcgggccgtgccggcccgatggctggtgggccgtgcctagtcgtgcctaggccgggccgtgccgagcgggcctcatggccatctataggggaaagcgagggtctggctcttgaagggagcataatcaactagggcctctttggatccggagggctaattattagccctccagaatcttactatttagaagtattaaacgtagataactaacaaaacccattccataacccgtaagctaatttaggagacgaatctaataagcctaattaatccatgatttactacagtgatactacagtaatcatccgctaattatgaattaatatacctctttagattcgtcttgcgaattagcccaggggttcaacaagtagttctgtacatagactttattaaatacttctaaatagcaagatttcggagggctaattatttgcctagagaactgaatggctaggatgcacatggaaggcattactccctccgtccaagaaaaaaccgatctagtattagatatgacacatcctactactatgaatctgaacatatatctgtttagattcgttgtattaggatgtgtcacatccaatcctagatttattttttctaggacggagagagtacttaaccaataactataatagaaccagtagtactagatagagagcttgttggcagaactatagcttcacctaaaaagggagcggaacatactgaagagctatcataaaatggactagagaggtaaactgagtggggttcgagccgcttcacaactccactctaaagcaagtgaagttaaatttaggaattagagttttaacaaacagactaataatatattatagcacaaataaaaaggatatgccaaatatatacacctatattttaaatttatacttcctctatttcacaccataagacgttttgagttttaaatagttatgcatgtatccatgtatgtgtctttatatacatgtccaaattcatatgaatgttggtgaatttatatgatatcttttatttcacactataagacgttttgggttttaaatagatgcatggatccatatatgtatttcatatacgcgtcctaatttatatagatgttggtgaatttagacgaggtatgaagatgccaaaatatcttatattgtggaacggaggaagtatatgttagtatgttcagaacagatattggtagaacctaatattccttatatttgaatattgaggctccgtttgagatagctaattgtttagttttttaatagctactgagggttataaacaaatgaatttcactagtacaaagttagaaaagttatagacaagcattcaaagaaaatttcatgtaggaatttgagtcggctgtgacctcgttggggaagttgaggatggccttggatcagcggagctggaacatgacacggttgtaggcggcgcgtggcctcgacgacgatgtcgtaggtctcgagccggtggcgacgacgagggcgtgaggattggtggtgggcgtcgtcgaggaggtgggcggcagcaaggggattcctggcgagaaggatggtgtgggaggtgtgcactgtggaggtggaggcggaggaggtggcacgtgtggtcatcaactcctagactgcaccaacaaggccgcccaccgcatcacccgttgccggtgaaagtgcatctaggcccctaatgattttgatgattgattacaatgcgattagagaggactaacacttttattcaagcaaatgtgaaggttgttatgtcctcgacatgttgtaatgagatgcataccccatgaatgcgacatcacgatgcaatgcggcaatgatcaaatggtatattgtatcttttaccttacattgtgtcgtaggaatgtcgtactattaagagcgataccacatgcatattattggtagaatactagtgctcaaaatgcttcatctttgtgtgagttgaaaaacctaagtaaaaatttcaatcccgagttgtttcacttgtcacaacacttacaccgggtttctttgcaagtttttcaacatctcttgaaggttttggaccatgttttatgttgggtttgacccacgaaactagcttttcatagagtccaagatcttcgaaatcggagttcggagtaaaaagttattgtagttttacttgatcaacatcagactatccgatttgaaatcagactatccgatttttcacagaacttcactctctgtcttgatttgaaaaaatcctatcgagtgagtttttctaagtatcggagtatccgatgtcggatcagatagtctgatgatacagagactccgaaatttcatagaacttgagtctctgtttgaggacgaagtttttgcttctaaaatatcagatactccgatttaacatcagttagtctgatgtctcggaaagtccgaaatttcatggaacttcgttctctgtttctcgttgccttggaggtttaaaatatcggactatccgatcttgtatcggactatccgacgtgggctgaaagattcctctccaacgaccacattttttttgggggggggggtctataaataccccccacctaacccttttctagggttacccaactcatttcattctcattcactttgggttgaacttggtgctaaggtgctttggatctttgagctctttctccctctctcaaatccctccttgttctttgtgtggtggatcttggtggttgtggatttggtgtttgagggcctagtgtgtgtttcactcgatattgagcactagggtttgaccaagagttgtgtggtgtttgttactcttggaggttgaggactcctagacggctaggtgtcactcccgagccaccgatctatgtgtggttggccgggagaagtttgtgaaggccggatctcgcctccgcaaggaaagagataccccttagtggaaggaggagtgcttagtgcaacctcttgaggaaagggttagcaaagacccggctcttagtgagctcctcaacggagagtagaatcccctcaaggatttgaactccgggaacaacttcgtgaacttcatcattggtgatctcccttcatcctccttttagctttgcttaattgtgccactatagatctagttgctgtttgtgctttactcttgtctgtgtgatagatctacttgttgtgcttcattggtggatcagacagtctgatccaacatcagactatctgatatttttggatagtctgactgtggatcagactttccgaccttatttcagttttagcttccgcataaagttttaaattagcctattcacccccctctaggcctaattgaccctttcagccggcctccttcgaacccgctggctggccggcccacctagacgagggtagaagagaaagagagagagagagagagagaggggaaggaggaggaggaaaggagagaagaggggagagagagggagagggtgatgacatggtcacccaggtatggccaccactatcggtgatatgggccagggtgtacaaagattggagggaagaggctgcccccagtgtccacgtggcactcctcccagggggtcgggcccaaggatgggcggcggccatcccctccaagcccgaggggtcgagccgccacgtgtatatggttaggtgggtgcctcacagcgtccacctaaccgcatttaaggcagttgcagcgggcgttccacgccgtgccgagcgccagaccggcctgtgactggtcagtgaccggtccatgaccggccgaatgatggatgggacgactgcagagcgctcatgccctgaccgcatgtcaggcggcgtgcagcgggttatgccccgttccatcgtaatgatgaggggctcttagccactcatcccatccggtgtggccaggcccgagtttgtattcccggtgcaagcctgcactctaagtccccatccattaaatgatgaatgacgcaggcgtcccccatgtcagccggcctgatgtggtgggccccatatggcagccgatgtgcgtgtggcttgccatgcctagccactgacaaagtgacatgcggcagacggtttgccccgcccagtcaatgaacaggtgacaggcggcggcaagttaccccgcctcatcacatcgtgatggtggggtttttttttctagcccctagatccgcccagagctggttcatctgctctggtctaaagccgacctcctgtttcccggtgtaaacaggagcccaattaagagtcttcatccattaattggcgaatgacacaatgctccctcgtgtctagcggctcgatttgatgggcccatgttgtggcggtcgaggatgtggtcgtcatgtcaatagaataaaacgtgctctttagcataatcaattatgtcgatgatataggcccgggggtatcatgtttggagggaggaggccgcccctaaacccacgtagcacttccccgaggagggtcgggcccggggtggagtgacagctgcccctccttgcccgagggtatcaaaactagaggaaggaggctgcccctagtgcccacgtggccctctcccgagcggggtcgggcccggggtaggggggcggccgcccccctccgcgaccgggggtcgggcttcctcgaccccctccgcgggtcgccacgtgcgatgcgttaggtggccgcccccaagagcccacctacccgcatttatggcggcatgcagcgcgtctgaccggtccgtgaccgatcgaataaccgatgggactaggggtagtgcacctgcgcactgtccgtctgtcaagcagcctacagccttgaagtgccccgtctcatcataatgacgagaggctttcagcctctcattccagctggagtcggtccgcccgctctggtcaaagaaaggatcccgtttcccggtgtaacaggagcccagaagtctccatcccttaaatgggagatgacgagggcaccccccgtgtcaggtggcctgttctaatgggctcaccaccaaggcaatgtgcatatggcttccgagctaaggcacaagacatgcatttaatgtagagaacattttccctcctctctaggtagctcttatggcatatgtggtaaccccttaaggtacaaaaggaggtccaggcctacgaaggaggtggttgaaacctaaaaattctgaagggaagctgagtcttagcttcctcgctagagattcagagactttgtaatcttagaaaaattatcatacacatgagtagggtattatgctccttagcggcccgaacctatctaaatctcttttgtctcacccctctcgagggcccgaccccctcatttcttcaaatacttccagctcctcaattttcatccactgccctaggccgaactaacaaaggaggagcctcacggtcccccgctcgaggagttcatcctccgataaattccttttcgccttctcccctaagtaatccggtaaactcctgtggtgcctccttaggctataaaaggaggcccatgtccttggtggggggatcaaaagattagcttttgcataccaactctagtttgtacatccgagattcagagactttcaaagctcaaaaaaatcatcatacacaggagtagagtgttacgcttctcattggcccgaacttgtataaactccttttatctcattgctcttgaggggccccgaccccctctacagcacacatccatccaaaccctcaattctcacccgctaccccccgcccgaattaacaaagggggcctcactcccccgcttgaggagttcacccaccggcagccacgtaggacaaaactggtgtcaaccacctaatgacccagagtaatctgtttttgtaagttatgactcagggtgatccggttttgtaagttgagggatcatatatatctggtttttcagttgagggacgatgttgtaattcggtgacaagatgagggatcttatatatactttttccaaatggcaaacgctcccggttggttcgggactagccccgattttggcccagctactcaggcccaataagcagaaggagaagcgggcgctgcgcttaggtctcggtaaggcaatgcgcttcgcggcggcgctgcgctgctccctcgcacgcgcgtgaccgcgccgccgccgttgcctcgcctctcctcgcagcctctctctgcctctcctcgtcgccactgagcactgggtctcggtgccgccgccgccgtccgcttgtcccgagccgcgtaggccggaggacgggggcgcacaccaccggtccccgccgcggcgccgcatcggcacagccacagaccaccgccgagcgaaggcgtccatctgccgcaccgccaccggtcgccagctccgggagctcgggaaccccgtctgactggctccctctcgcactgtcgcctgaccctcatcccctgcccgtcgctgtcgaccgccgttcgcggcttctctaccctccgcgccgcggctcccggctgccgtctcctgctcctacaggttatacctctagctcatatcttcattattctcactgtgtttgatcaaggaagcatttgccattgctaaatttgtgatgtgccgcggacttattttagtttgtaggattggtaaagacatgaagaggagtggggagtacacattttgaactatctgtattgtaatatgtgcacattttgaacttgctagttaaattagttgattactgatgttataagatattattggtatatttgttcgccttttacctgaatttgtactcatgggatttgcggtgatacaaaattttggtatgtgatgtgaacttgtgaagcaggaccaccggacgaaaatttcttgttacgccactacttcataagctactgcgacgatctctcttcctaggcacctccacccggtggcctggctacctgctacaccgattcaccctttacttgggtattgtttcccccatttgcaaaatgctgcctaaggtgagcttgcttttttcccctcctcttttcttttttcttttctgttcgtatgtgcttgaatcggtcactcactttttctatacattacgattaattgatgttttgcatggtctaaggcactaggcaaaactaatgttgtactgaacttgctctctctttggtttctcgaaataagttggctgaacccctgcctgcagcagcccgtggtggtttcttggttctgttgttataaatgcttaattgcgcaagtgcttacatggagtgcttatatagtaaatagaatcagatttgtgttgttcatattttttgtgtgtgatgcttggcagttgtttatgtataaaataataggaaaaggtagttgtctgagcacttgtggtaccagtagtgattgatcgtgtcctgtttacttgtagtattgttaatatggctatattgttagtatggctgggttctctttgcttttgtatcaagtaggagtctgcacgatgctgcaatcctgtagatgcagtccctaggctacgctccagttagtgaaggctcagtactgctgttctagtagttctagtgtgtcgagggaaggatctggtccgctggctctgtgtgtgtgtgtgtgtgtgtggaaactacttaccgtaggagtattgacttttgtaatgtcttgtctcctaaacttctcccttcttcctaccatgttttctgtacttcaatagaaatgggcatgcccttatcaaaaaaataataatctacacttgagaaaagaattttgcagtagacaatataaattatatatgagttctcgatgatatggacacatccttcttttaggcaccatatttataagcaccaatcattcacataacctcaagttctttatatacctcccattgtacatgatctcaagttttcaaattcttgtatatggttgtatgcttgtttctttataggaggtagatatcaaatgatcctaatggcttttttttaatatgatgtttcattaccaggatacttttgataatctccaagccaaggttcaaatgtgtttcgttaggataatagctatgagtgcaggaaaaccgactttatttgctccaggaatagttattgcgaagaagaagctatcatgctacgtcataacagacaaggggacattttgttatggttctgaagggctctatgctgctgtttttcctggcttgaacatggagagtgtggcgattaactttaccgatgtatcaattgctgatagttgtctctttcatgctaagcaaaccaaaatgcactaatccattagctgctgtgaaaatctgtgaatctggaccgttgattaatgaggatgtttacaccttgggatatcagaatccaaaagtaccttttatctcctggatcggtccggtgagctaaaatccttatttttatctaatttcatctgtcttacttcctctgtttcattaacatcaatatgaatgtgggaaatgctagaatgacttacattgtgaaacggagggagtattaaatgattatattagatttgttggttcttatgaaatgcttaattagtcctattaaatgattaaattatatttataggctcttatgaaatgtttaattaggtttgtaagaaaggcggattttactcatgattgtgctacttccttgtgcctcatttgggtcccctgtctttactgttgatggtcttttggttgggatctgcttcgacaatagaggtgctgtccgggcctataaggtgcaatctattatacaacatgttcagaagattcaaacacagataaaaagcaaggtgcagtattttgaaatcttttgcaatcaataacatcacaaatttctcttatttacaatctcttggtttttgtgtaggcaatcaaggacattttgcagccttttatggaccaaaagaatgttttattagagaaaaggaagccaccagttgatactagtgccggagcttcaaaaaagagtaaaaccacacgttgatagcgtcagtctatcagagcttcgaaaaaagagaaaagcccttagcaatgcacataaaagatgaaggcgcaagctaacagatagacagtggttacgtaagtttctagtgcatcacaatatgtcaggacatcttgttctgatctttttgttcgttttcatcaatttagtttttttttgttaattatatacttgcagtttgtgcgtggatattcgcatgctctatgactcgtcatgcctcaatgatgcttcttcacccgttttcatttggctgatggaaaatcttttggaggccagcttgtggattgtaggtggctgccacaaaattgtgattcctttctaggggcaatccagggctgttaaaacctctcaagctttcaaattgtagcagctgtgtggtgatatgcttcctcagattacagattccggataccctattggtttctttatgcttcctcagatttcagattccggatactctattggtttctttatgcctgacccgcagaactgtttattttttgatgcttgcgttgccctgtgccctactcgcttagtgttgtctgttcttgtgaaacgtgttttagtgggaagtctagtaaaaaaaacaggtttagtttttcattctgttaacatgtatttaatacatcctccgtttggattatataacacccccatcggtttgcttatgcggttgcttatcgaataaaaatttaaaagttacattatttttaaacttttttatttatacacgtgtttttgaaagatctacgaaaatactctctgtcccacttccccataagttgtttttttatgggattggatgcaatatacaccatcgttccaggtgccagaccttgcggtggcgcggttcatagtcacattactcgctggttgtacaattgaggaatatgattttaacaggagcaagaaatgaggaaggcaaaatagacttaatcctttctggactgatgtgtgggccttgtttttagctgggctttttctttagagtgggctgccagcatgcacatgggcctcaaacccacatatatcactttaaaatttgttttaaatttacatatacaaagtttatagatataaactttacacgtgcaaagtttaaatgcacatatatgtaaaatatatacgtacaaaattgctatgtatagttttttctgatgtaataaaattctatatatatatttttctcgagactaatttaacacaccgttgaatttgtttcaaatttatatgtgcaaaatttgtacataaaaagtttgtacgcatgtacttacaaaatttgtacacatataatatgtctatacatgaagttttatatattaattattttgcatataaagtgtatgtataaattttttgggctggaccatcacactattaggatgaaccactcaaggctcggtggagagatacggaatgggaaatgattgctatcggctaaagcggttgctctgcatggaaacgtggtcgtgcatggcgaccgaatcgcgatcgatcgccgattagacctaccctctaattcaacatgaaatttcatcgttaatgcaaagtgatgcaagcacaagcctcgacaatgatgcagacaaggtaaggcagctgcttgagtttgatcttctccggtttctccttgatcttgtccttctagtccacctccaagttcgtcagcagctccaaattctgaaaaatctgcaaaacaaacccccaaatcagaaacgtcatttgatggtccaaattgctattggatctgaaatatgtagtttttcagtgcttcattggctgtttcgatcgtgaattcgtgaggcctagaatttgtttggtcattcgtttgtgatgcaaaatttgtaaatagaattctcacaccatagcgcgttacacgttgttttcagtagggagtgtttaaatctagggggtaaagttttggcatatcacatcgggtattatatatgatgtcgtaaagggtgttccggcactaataacaaaactaattacagtatccgtcagtaaaccgcgagacgaatttattaagcctaattaatcttgcattagcacatgttattagtagcaccacattgtcaaatcatggagcaattatgtttaaaagattcgtctcgcaaagtagccgcaatctgtacaattaattgttttttagcctatatttaatagttttatgaggtgggtgtttaaactttcaatgtaatatggtgtaaaattttagggtaagatataaacaaggccttaatgtgcaatatgctgagagctattgaatattgctggtgagttgcacttcacaaactcttctctgtgtaatatttgcgcaatctaacagtacttttatttgatctgttgctaacttgttactactacttcgatataaaaaaaaagattggggcttccatttctcttctgttttgctggagtatggggttttacttttgaaattcgtacttttgtttaacaaactgtcatgttccttctgcacattgttgaaactaatacaaagtttcagtgctaaaattattcagatcttcagagctatgaaaagcacttcttcgtaaggaatgacttaggtggtgtttggatccagagacttaattttagtctctgtatttagacactaatttagagtattaaatatagactacttacaaaactaattacataaatgaaagctaattcgcgagataaattttttaagcctaattaatccataattagagaatatttactgtagcatcacataggctaatcatggattaattaggttcaatggattcgtctcatgaattagtccaagattatagatgagttttattaatatgtagcatcacataggctaatcatggattaattaggctcaatagattcgtctcacgaattagtccaagattatgaatgggtttttattaataacctacgtaatatttataattagtgtccaaacattcgatgtgatagagacttaaaaatatttttaatcccatctaaacagggtcttattcttcttcgctactacctgagagagaaagaagcagacactaaaccccaagaaaagaagtgagtctgagcaatgttgccaaaaagtttcggccaaaacgggagcagaagagcaggagaatggctcaccaagaagtacgatatcggcaatggctcgtagagaagagggggaagatggataaagcggaggtgctttagcataaaggaatctcaaagtgacctggccattcaaaagaaaccaaattgagattttcttttttccctacaaatgcccgctaagaactcggctatgcacgaacacaaatgtctgtgcctatcgggtgagtgagaatgcagcttcaaatctgaaccctccataggaaaaatggatggctaccatcacatgcattcctcatcaaaagtgcgtcgattgaggggtgcggcggtccgcggtccgcggtccggcattgtctcggggaaaaggctgctagcggttacatcacatattcacatgcattgtcatcctgaggctgtgaccatggtccatggcttacaagcaacgctactactaccttcccgaatgagtgactgcctccgcctagctgctagcgggtcacatgcatttcatccggcccaaatgagcgactggcccatcatctggcttgttgcagcgagagacgtaatggaatcattgcctaaaacagaaatgagtcaaaaacgcttttgtacatctgcctagcagctcagcttgaccatacttgccatggagcttcaaatggtagaatgggtcaaaaacactttcaaaaagatcaacggccggatgcccatgcatttaccaaccgggtccggctgctataacaagccgagctcgcacgagccaaggctgaccttcgagcttaacacaggctcaacctctgcgaggctccagctcgattcgtctgagctcgttaaaacatgaacagacaattaagtttatctagagcaaacaacgttgtctcaatattttcattctcataatcaacagtacaccgagacgacatgtttcaacgccaaaggaaaagaaacaacacattgtctcaatattttccttctcataatcaacaaggcacgcaagaacatacaccaagataactggactgctaattagttcagtacttcaaattattaccaagcttgtcttcctccgtattttaatgtatgacgccgttgacctttttgacaaacgtttgacatttcgtcttatttaaaaattttatgtaattataatttattttattgtgatttgatttatcatcaaatgttctttaagcatgacataagtatttttatatttgcataaaaattttgaataagacgagttgtcaaacgttgattaaaaagtcaacggcgtcatacattaaaatacacggatggaataatattttggccaacttacctaaggtttggctaacaaaattgaagatacactttagttagcataagccactattgccacatctttttatctcaatggcatgcgaagcctatatagtgaagaaagaatcttgtcttaagtatgactaatccacctaacttagttagatttgtctaacgcaagatatgtggcaaccttatgctccctccattccaaattaatctatatatttcatagctatatcaagaccaagacaaactaataactctctcatactatatttattctatcaacaaactcaatgcatgcatcatccccaatattttctagccaatagcaaatcaagatattgcatgtgggttataaatacttgtgtgcatgtgacggagcgtggggctcctcaccgggagaccgcgcaggcccccctttgccggttcggccgggggcgctaagtgaggttcttcgccctcgatctgaggaacgtcagcgagagaagaaatgcgcgagacacgggcgacgtagacaggttcgggccgctgagaagcgtaacaccctactcctgtgttctggtggatctgtgagtgaaggaatacagagagccggagagcgagagagagttcaggctctagccccgttcgccccctctcttctcctcttttttttctctctcctttctttctaggcctgggcctcctttttctctggtcaggggtcaccacaagggcctctcgccacctaagaaaggaaacatgcttttacaatgagggctagtctacagccggaagtgacctctgacaagcagagcgcacgtctcctgctctgctcgcccctttttcggtggacgcccatttcaacctttatttaatggccagcgacttccttgccatacttgcgctgaagccaggaatggatctgaccgggactgacataccaactccaggagttagcacgccggctccggctagggacgagagccacgaagctctcatcattccgacgggacggggcgaggcgtgtgacaggctgcctgttgccacctaacccgcgatctgaccggtctgtgaccggtcacacaccgcgactggtcacggaccggataagcgtgcgctgcgccgcattaaatgcggcgtggcgcactcgtccaacctgctataaatgcggttaggtgagcccgctgtgctcacctaacccacacacgtggcgccaaaaccacagggggtcggggcaccccagccctcggggccgaaacgggagcggcccgacccctcggggagacagagggaggggtggccacgtcaccgtcgggcccgaccccccccccgagggggtcaggccacgtgggtgaccgcggctacccaagcctctagtcacgatacccccggccccatgtcaccgacagtagcccccggcgttacgccagggcgaccgcccccctcgagggaggcgctcgggcgtgatgccactccttaggcccggtgacaggtggggccggtccccacaggcgggcggaaacccaacggtcgcaaatcgcgcgcatcggcaagggaaaaaccgatcgacaataatgagcggcctcttcaagaccgctacattactcgagcagcgcgcgaatcgggacgagccggtttgtttcgcctggggacacgatgatggcgtttttcgcggttggcgagcgcagttaatgcgcgcacgatctgccccatctcaaacgccacggccgcacatctgccgcgtgcgccgcaaacgggcaagtggggttagtggaggcgtgggcgcgagaaacgagggggcgaggtagtgggcgcgggaagccaggagccgggcatagcgttggcaagggtacaaagacgccaaggaagggatttgtttccttcctctcaccactcttccccttgcctttgccacttgtgctctgactctccgtttcctgcgccctacccttgccatactcgctcgctctcaagctcctcctccgccggcgtcatggcacggggctccgcaccgctcgagggtagcgtgctgccgccttcccgcatcgtgagcgagaggcaggccgggctgccgcgccgattcatgccggaatctgccaccggccgggaggtggtcacgctgggcgagggacgcccggcgccgcactacccggggcggtccgtcttcttcctctctttcgcaatggcggggctggtcccgccattctctatttttttcatggatattctggagttttatgatctccagatggcgcacctcacccccaacgcgataatgacgttggccatcttcgcgcacctgtgcgagatgtttgtcggggtgcgcccatctctccggctgttccggtggttcttcaccgtacagccggtgtcgccgccgacggtagtcggtggctgctacttccagccgcgggggcaggtgctgaaccgctacattccctgcgtccttcgcaaaaagtgggacgattggaagagcgattggttctacacccccctcgccgacgaagcgcgcctccgacttccgaaccagcctccggcgcaggcctccagctggcgggcggcggtagatctgggagacggctacgacgccgttcttgaccgcctggcgggtctgcgatcccaggggctcacgggggccatggtgttcggcgactaccttcgtcgccggatcgcgccgctccagcggcgcgcccggggcgcctgggagtacaccgggcccgaggacatcatgaggacccaccaggggcgcaaatgggactgggaccctgaggatttcaggatggtggtccaacgggtgctgaatctcagctccgtggaggcatccctcatcccccaaggggtcctccccctctgctgcgatccagagcgcgccaacatcctgaccatcatgcaggaggtcggggcgtcgggggagcgggccccccgaggccacgatggcgcaggtgggagccgcaggggggaacaatctaccccgggagggggtcgtgcttctgggccccgcgacgggggcccggggggcagccaccctgccgacgcccgggggaagaggaagcaggagggtacccctcccccatctcctccccaagggggcggggcggtgcgtgccagcagcaggcgctcggagggtgccgcgccgacgccgcagcccgagggggagcgaaagaagaaacggctccgcaagatgggggggatcgtgccatgccgggggaacctcatctcgcccccgaggtggtcatttagccgacctccccgcaggttcgtccccatgcccaccgcggccgtattcatcctcccatctcccaaggcgagttttcactcacccgtttctttttgtcttctggtttttcttctgcctcagcgagatcccgtcgccccccccccccccccgccattccaagtccggccggtctgaggccgaggagacggcgaccgcggaggtccggaggcgggaagctgaccggcgagaagccgtggaccgcttccgggaagccgaggaggctgcccaggaggccgtccgggttcgccaggctgagtaggccgctcgggaggaggccagactccgccgggccggggagtccgtccgggaggcagaggcggcgcgcgcacgccaggcggcctgccaaacccctgacccgactccacccgaggcgacgacgacttccgaggccacccacgacgaagccgtgggcgcgccgctcaggcctgacccctcgggcgacgcttgggacgagccagcttcggggggcgcccccgagtccggcacgtcgatcggcgggccgagccgcgcggcgcccacaccgaggcgactctcccctctgtcttccgctgccccactgagtgcggagcccttcctgcaggccttggtcgccgcgaacagcacggtgctggacgggttaagtgcccagatggaggccctgcaggcggagcgggcggagctcgacgcggcgtgggcgcgcgtcgaggaggggcggcgctcggtggaggccatggtggaggcgggccgcaaggcgcaccgccggcacacctcacagctcgaggcccgtcgtagggagctggcggagatcgccagggaggtggaggaggagcgggagactgccctcatcgccaccgccgtgctcgacgaggcgcgggacgacctccgcctccaatacgggagccgggcggcggagctagaggagaagctcgacgccgcccggggagtccttgacgccgccgctgcccgggaacggcgggtggcggagaacgaggcggcgtcccggcagcgcgaagaggcccttgaggctcgcgccacggcgctggaggagcgcgcccgcgccctggacgcgaaggagagagacctggcggaccgcgaggccgccgtcgccacccgggaggcaacactggcggcgcacgaggccgcctgcgccgaagaggagtccgcactccgcttccgcgaggacgcgctcaccgagtgggggcgagctctcgaggaggccgaggccgtggcgcagcggctggcggacagcctgttcctccgcgaggcagtgcgggaggagcaggcgcgtcgcaatctggaaggcgtccgcgccgagagggcagcactggatcagcgggccgctgagctcgaggcgcgggcgaaggagctggacgtgagagcgcacagcggcggggcggccgcgggccacggcgacctagccgcccgcctcgcagccgccgaacacaccatcgccgagctgcagggcgcgctggactcgtccgccggggaggtcgaggccctccgtttggcgagcgaagtagggcccggcatgcttcgggacgccgtctcccgtctagaccgcgccgggcggcaggcgggcctctggggcgggcggcacgcgaagtacgccgccaaccaggggggcctcgcccagcgcctctcagagatgaccggggccctcgagcggctccccaaggagctcgaggagacgatcatgtcatcctcgagggacctcgcccggggggcggtggagctcgtactggcaagccaccaggccagggaccctgacttttccccgtgggcagcgctggaagagttccctccaggaaccgaggacggcgcgcgcgcgaaggtccgggacgccaccgaccatatcgtccacagcttcgagggtacggcccctcggctcgcgttcgcgctcgactccgacgaggagggcggtgacgacggtgcggacgacagcgacgacgaggccgacgtcccgggcgcgtcggagtgagcccccaggcccccgccaatcttaataacttttgcttcttcttccgaggctttcgggcccccttcttgtatagactgatttaatctgtaatcaagtaaagaggaaatttccacgtcagttctgtttgttgtgtgtatgagacgaggatggttcttgccgcggtccttctttgtcttggcttgaacaagggctcgtgcccaggtcccagcctcaaacggcgcgggtcggagccagtgcctggggagatcctcgtgtcgagactggccaggccgggagcgcggtgaccgagggttatggatgacccgattgtgggcctttgccgattcccccccggaggtcaccacgccccggggcacggctcggttctgggccccgtttggcgattttagccggcccgggccgccgagggcagggtcgagcacgagcgtgctaattcaagccaagattcttcaaaaggaaacgatggcacagacacagtcctcaagaagtcgaaaatgcttttattgaaattcggaagagaaaaaaggtaagtatatgcatgtggtagcccccggccaatcctgcacgcccagggggggtgcggggttggcccgagcccgagacatgacgcccgacccccactaggggtagaagcgacgaaggtgttcgatgttccacgggttaggcagctctgtgccgtcgcccgtggccagccgaacggagcccgcccgggggacgccgatcactcgatacggaccctcccacattggtgagagcttgctcagtccagcacgcgtttggacgcggggtaggacgaggtcgtcgacgcagagtgatcgggcccggacgtggcgctgatggtagcgccgcaggctctgctggtagcgcgcggctcggagggccgcgcgccgccttcgttcttctaaatagtcgaggttgtctcggcgaagctgatcttgatcagcctcgcaatacatggtgacccgaggggacctcagggtgagctcagatgggaggaccgcctccgcgccgtagatgaggaagaaaggcgtttccccggttgctcggcttggcatggttcggttcgcccagagcaccgctggcagctcctcgatccacgagtcgccgtgcttcttgaggatgttgaggagtcgcctaacaccaggaggcggcggatccccagtccagctgccactctgagtcccgcaagaagtccctcgtactccgccatattgttggtcgcccgaaagtcgaggcggaccaggtatctgaggacgtctccgctcggcgaggtcaacgtgacccccgcaccggcgccctgaagagacagggagccgtcgaactgcatcacccagtaggcggtgtgaggcagctgcgaggggcccgagctggcctcgggggcggagacgggctcgggagctggggtccactccgccacaaagtcggcgagggcctggctcttgatcgcgtggcgtggttcaaagcgcaaatcgaattcagagagttcgattgcccatctcaccacccgtccagtaccctctcggttatgcaagatttggccgagggggtaagacgtaaccactgtgacccgatgcgcctggaagtaatggcgcaacttcctcgaagccatcagaatagcgtaaagcatcttctgggcctgagggtatcgggtcttggcgtcccggagggcctcgctaacgaagtagacgggccgctgcacctttcggcggggccgatcctcttcgccaggggccgcatctccagggcgctcttcgtccgagaggccacgcggggcgcactcggcttctgtgccgacaacctcggggtcagagggcgacaggcgcggccttcccgcagtggccccggggccatcctgggggtcgggggcgcctggcaccgtcggacaagcaggcggagggccagctccggccgtcgggggcctcgggccgccgttcggctcgggggcctctcctccctgctctctcccgggtcgagtcgacacaggactgggatgtgcggggcgagggttgtcctcgtcgcgctccacgaccaacgccgcgctgaccacctgcggggttgccgccaggtagagtagcaacggctcatctggctccggggcgactaggactgggggagaactgaggtacgctttcaactgagtgaaggcccgctcagcctcctctgtccaggtaaacggcctggagcgtttgagaagcttaaataggggtagcgccttctctcccagcctcgatattaaccgacttagggcggccatgcagccggtgacgcactgcacatccctaagcttgctgggggggcgcatccgctctatagctcgtatcttctcggggttggcctcgatgcctcgggtagagaccaagaacccgagaagcttgcccgcaggcacgccgaacacgcacttatcggggttcagctttatgcgggcggagcggagactttcgaaagtttccgctagatccgagagtaaggtctcttggttgcgcgtcttcacaaccaagtcatcaacataggcctcaacattgcgtcctatctggctacccaaagaaatttgagtagtacgttgaaaagtaggacctgcattctttaacccgaaaggcattgtcgtataacaataagttcctatggggataatgaatgcagttttttcctcatcctccctagccatgcgaatctgatgataaccagagtatgcatctagaaaacacaaaaggtcgcaccccgcggtggagtcgacaatctgatctatgcgtggcagggggtaagggtccttaggacatgccttgttaaggtcggtgtagtcgatgcacatccgaagcttgccgttcgccttgggaacgacgaccgggttcgccagccactccggatggatgacctcacggatgaatccggcctccagaagtcgcgccacctcctcgcggatgaaggcttgacgttccggggcctgccgccgcactttctgtcggaccggccttgcgcccggccgcacggcgagacggtgctcaatcacctccctggggaccccgggcatgtccgccggtctccaggcgaagacgtcggcgtttgcccgcaggaaggagacgagcgcgtcttcctatttgtcgtccagaagaccactgattcgtgtggtcttggacgggccgtcgcccagggcaacctccttgaccgggacctcatcgcacgtgaccatccgctgccttggggcggccgagacggaggtgctgagcctctcgtcgccacccgcgggcttggacgccgcggcaaggtggtccgcgcgctgctccatacaagcaagcgcgactttgaggtcgccatggacggtgagggggccaccggggcccgacatcttcatctggaggtaggcgtagtggaccgctgccgtgaacttcaccaacgcgggcttgcccaggaccgcgttgtagggcagactgaggtccgccacatcgaagtccacccgctccgtgcggaagttggcggaaccaccgaaggtgaccgggaggtcgatatgacccagcggccaggtgtgccccggcgtcacaccgatgatcggctgggacggccggagcaccatccccggggccttgatggcgtcaaaggctgcgggggaaaggatgttgagggctgcacccccgtctatgaggacacgccccaacttcacattgcaaacggtgggggaaaccaccatcgcgatctgtcctccccgggcaacgcacggcgggtggtcggtctggtcgaaggtgagggcaacctccgaccaccgcgcccgccgcgtcgcctcatgggtaggggccgtggccagaagctctcgcttcatggccttgaggctccggcgagaagcgtgagcgcacgctcccccatcgacggtggcgacggtggcctcaggctcctggaaccctaggtcatcgtcgccatcgtcgatgtcctcggcggtggccttctgcttggcctcacctcgccggttgccggcgggagccgccggggtcttgccctcacggcgctcctgcctcttctcctcctcccacttcctcgtccgctcagccaaacttttgaccgcgcggcagtccgcgaggtcgtggagggaggtgttgtgcacggtacaccacttgccggtcgggcgctccctgctgggagcgccggcctccttctttttgtcgctcgcaggcctcccctttcggggggcccgcgaatcgccctcgacggcgaggacgtgaccctcgtcgtcggaacgggccgaccccttcttcctcctcctgtcccgccgccctgaccgagcggcggacccgggggcggccggagctgccacaccagaaacggaggagttccaggtccaggcctcctccttgcgagccacacggtccgcgagctcaaaaagctgcgcggtggtctggggctccttggaggcgatcttctcgagcatgcggttgtgccgcatgccccccctgaacgcgtagatcaccgcgtgtgcggggatgcacggtatggtgttgcggacttgacagaaccgctgaatgtacgagcgaagagactcatcgtcccttcgctgtaccgcatgcaagtccgcttcttcgcctgggcgcggatatatgccctggaagttcgtggtgaactgctggcacaaatcctcccaagagtggaccgacgcgggtggcaagttcattagccaatcccgcgccgacccttcagggccatggggaagaaattcgccatgaccctgtcgtcacccccggcggcctcgatcccggtcatgtagatctggagaaactcggcggggttgacgcttccgtcgtatttttcggtgatggtgggccggaaccttgggggccaacggacgttccgaaggctcgccacaaaggttcgacagccggcaccgccaaccggggacacggggggctggcccccgtgcccggaccgaagtggcgctccggacgaggaagcgccctccgttgcgtgggcggcgtgacgagcgtcgcgccggcgctcgatatcgaggcgggcatccggccccccactcacatcttcttgggttggaggcgttgacgagggaatggcggacgaacggcgggcaacggccaccgctcgccgcgccctccgcctcgacgacttggagccggcggcggcagcgccagaggcctcggtggcggaggaccgcccgccggcgcctagtcgctgctgcgccgtcatgaccaattcggccacgtcatccagccaacgtcgggctggagtctttggatcggggacgacgggcgggtgacgcaggagcgcgcccgcagcctggagcgcgccctggggcgtgccgccatcgcagtagacgaggcagcgacgcgccccgcctcgccgtcctcccccgtcgcccgcgggcggcgaagtcgcggatcctccaacctccctgagcgcctccccccgcccaagatttcggcgagagggggacggtggggtgcgagcccgacggcgcgggttctgctccccatcgtcaccgctagcgttcggagagaggctgtgcgccactgcccgttcggccattgggctgagcgggcgaagcttggcgcacacgaaagaggacgagggcttagaaagacacgcgcgccccctacctggcgcgccagatgacggagcgtggggctcctcaccgggagaccgcgcaggcccccctttgccggttcggccgggggcgctaagtgaggttcttcgccctcgatctgaggaacgtcagcgagagaagaaatgcgcgagacacgggcgacgtagacaggttcgggccgctgagaagcgtaacaccctactcctgtgttctggtggatctgtgagtgaaggaatacagagagccggagagcgagagagagttcaggctctagccccgttcgtcccctctcttctcctcttttttttctctctcctttctttctaggcctgggcctcctttttctctggtcaggggtcaccacaagggcctctcgccacctaagaaaggaaacatgcttttacaatgagggctagtctacagccagaagtgacctctgacaagcagagcgcacgtttcctgctctgctcgcccctttttcggtggacgcccatttcaaccttcatttaatggccagcgacttccttgccatacttgcgctgaagcctggaatggatctgaccgggactgacataccaactccaggagttagcacgccggctccggctagggacgagagccaggaagctctcatcattccgacgggacggggcgaggtgtgtgacaggccgcctgttgccacctaacccgcgatctgaccggtctgtgaccggtcacacaccgcgactggtcacggaccggataagcgtgcgctgcgctgcattaaatgcggcgtggcgcgctcgtccaacctgctataaatgcggttaggtgagcccgctgtgctcacctaacccacacacgtggcgccaaaaccacaggggtcggggcgccccagccctcggggccgaaacgggagcggcccgacccctcggggagacagagggaggggtggccacgtcaccgtcgggcccgacccccccccccccgagggggtcaggccacgtgggtgaccgcggctaccgaagcctctagtcacgatacccccggccccatgtcaccgacagtatggatgcatgcatcaatctccatttgctccaatgcacaaataacaaatagactttaataaatgcatacaaatatgtagatcatttagaaataacctaaaaaaactatatgtagatcaatttgaaatggaggaagtatatgttatgggaaccaaccaaacagtctcgacatggagtcttgttatggtggtgcctatactattagactagctagctaccctgtgtttattttgtgggtttagcggaaaactcatagaaatattaattattgtgacgagttggatgaagattaagattttcgtggcacgcttttcaaactgctaaacggtgtgtttcgtgcgaaaactttgtatatgaaagttgctctaaaatatcatattaatatatttttcaagtttgtaataattaaaactcaatcaatcatatgttgataccatatcgttttgtgtaaaaaacttaatctcttcttcaattccttcccatagagcatggtgaagcgccatagcctgctgctgcattcgttgccgttccaagagctcctagctgcgccagtagcccagtactcatcatggacgatgctgaacactagtacagacctgtcgatcggttcgtaataggatttgctcttggttttaatttagaacctgtgggaggcatacgacaatgatgccccgggacatttactatcggttttaaatcggtggtgctagctaggcatcactgctggtttaggctgtgcttagttcttgtgccaaattttttttaagtatacggacacatatttaaagtattaaacgtaaactaataacaaaataaattacagattccgtcggtaaactacgagacaaatctattaagtctaattaatccgtcattagcaaatgtttactgtagcaccacattgtcaaatcatgacgtaattatgctcaaaagattcgtctcgcgatttacatgcaaactatataattggttttttttccgtccacatttaatgctctatgcatgtctccaaacatttaatgtgacagaaaagttataagtttgaagaaaaaaaattaaatctaaacacggcctaaatagacaactctaagaagtagtgatgcgcatttctctcctattaaaacaaatactacaatcaacttacaattttacacaattgatgtagttgagttgcaaaataacttggccatggtttcatggaacatacttatgtacaattcgtgtaaagaaaaaaaacttatgtacaattggtcatgttaatttccaaactctagaatggacaatgccacaatggaaggactggacatgcaaaaaagcagctgcaggatgcatggtagcaggggcggacctacactgggacatgggggtacagctgtacccccaaaatttttggtaacaaaaaagataatatatactatgtatacagatcattaggccaaaatatttgtaggctttgaaaaaagcaatacaaccatccgtccaatggtattttcttcttctagataatagagataattgggtatcattcaatggtattttcttcctctagattggatccaatctttatgggtggtgcagccatataatcgctacaatcgcaacggttagttgtgtcttctgtactatttttttcgttcattgttcactacaaatcattcacaacaagttatgtataaagattgagatatactttgtttatatatgcatgcctgcgcttcgattgagtgttcattagtggtttgagtatattttcatcgtcgaactgtttccttggtactatgtacacagtccgtagtctgtaacttcgtacccccattgttgaaatcctgcgtccgccactgcatggtagcctcagacggcgggtgcacctcctggaacaccggcgccgaacagacgggcgtggttcctgcgcgacgtgggggctcgtatatatggtgacaatagcggccatcgacagtgtccatgttgagcacactaaagggggtaataacccaacatcttaacctccctgtggcctgtggggtggatggcttggctgatgaagggggtaaaagcgtaagttattaaagcgcacagcataacgggctcggcgtttgatttcttgccgagccgagctccaaacaagcttgaaacgagccgaactagcttgcgtctcgagccttttggacagctctgtccggcgggcgatgatataaggacaaacagcgctctacatgccgatactccgtcccattcttccgcaagtccaacaagtcaagatgtcctcatcagcgccaacaggtaggccagctgttcttttttttttccctcccatttactgttgaattaaggccaaaagatcctactgtggcgctgctagttttgaatctgcactcatctacaacttaactgttctttcattcattcgatctcttgcaagagaagttagttacaaatcttgcactcctatcctttgcaactagcgctttgttcttaatttcattgatcctcttgcaagaaaagaaaatggtttttttaaaaaaaaataaaaaatttgcttgtggttaacgtaccgcttctttttgctcttgtgttgcttaccaaggtgattcgccgccgtcgcggacgccggaacagcgcgtgtacgacgaacaccgcgtttcggtagtccaggtgacgtgcgtgctggttaccaaagaaggcaggaaacttggcgtgggaactggctttgttgttcacaacgatggagcgtcgtgcttggtattaacctgtgcccacgtaatcgatcctaagcggagtaagctatgttctttttccctctttcccaactcccttcactcgtttttcacgtacacatttttcaaactgtcaaacgatgtatttttttaaaagttttctatatgaaagttgttttaaaaaattatattaatccatttttcaagttttttttagctaatacttaattaatctcactaaatcgtgtgctttgttctccgtgtcaggaggaacacagcctaaggaactgtccgttcggtttggtgcggatcatatcgcctctgctcgattggtgcacgtctcagaacacgttgatcttgctctgatccgtgtccaaggggcgcctaactgcattcctctgggattctccgatgaggctgatttgtctgggaaggaggttgtcgcgattggattcttcggacttgacggcacctccatgtgtattgatccgggaacatcgcgcggccacatactgtaattaacgagagcctttctttcacatttttctttatgaaactacatatgtatatgtatgttcaatgcaatagctttgttaattactgtacacgctgatgcaaacctactgctcctagtaggtaactaatgctgtttgacgctgtctgtttcacaacatgcatgtgcaggggcgaagcagtggtctttccaacagattctgatgatctaaatgaattctcccctaccaatttgccgacggcgaaaggcatgtcaggcgcaccggtcctcctggaggataaggtggccggcgtcctatgcaatagtgatgctgcggttatcaatgttatctaaatagttatgaaaaaattttaaaaaaattgacatgataggttagtatgtatcacttcacaagcatgcaagttcaaattcaacttctacaaattgtaacaaaaataacaaatttgactgtaaatatacatatactagttagagtttaatttgttatttttgttacaacttatagaagtcgaacttgaacttacatgtttgtgaagtaatatattacgtattaatctatcttgtaaatttttttaaaattttttcataattatttaagtggaatgcaagaaaagagagattagaatccatcctctgagagtgagacagagatttgtcgaccaccattgcttcaagaaccaccaatccggcaatctctgattccgttcatccttcgttccagcttggtatgatccaggacggcgtctcgccgcagagggccatctccagcttgttgaggcagcaggcgagcttcttgaagctccggttctccaggctgaacaccgactgtacttcatcgtggtggaatgccgatcgttcacctccttggtggtcaccgagtagatggtgttgccctcgaggttctcgaatcccgcggtctccatggcaaatccgtgcaggaatcgacaaacagggcgcggccgccgatgccggtgagctcctgtcaggccaagtcaaagctgtccggaagccttggagaagtcgatgtcgtcgccgaagaggtacatcctttggacttgatgagaaggaagagctcgtcgcctgccaccgcgatgcgcgcctcggcggggagctcgacggcgggcaccgggatgacggcggcgatggggagggtgagggcgtcgacgatggtggtgcagcagtagcagacgtcgtcctcgaagacaaagaactcgccaccggagtagttgatgctgctcgcgttgcagtcggccatggcggcgataggggcccaggcggcggcgggcgggtcggaggcgtagaagaggagtccctcgccgcaggacgccatgacgccatgcggcgaccagtcccaggccaggtcgtccgtctcggcgaagaaggccgggagcggcgggagggcgcggacggctccggtgaagaggtggaggagcgacgcggcgaggtcggtggggtcgatggcgagcgtccacccgtgcggggagacgtagaggatgcagtggcggcaaggagcggcggtggaggagacggcggcggtggagaaggcggcaggcgatgaaggcgtgataggcgtgaggaggcgtcggcggcggggttcgcggctgccggcggcgggcgacggggtaggcgcgaggaggcgtcggcgccggtggagaaggtggcggggcaggggagggggagatggatcgctaattaatttctataaccgttcacacggagtgggatcgctaatttctgtgtttgttcagcccgggttgggaacccaaatcctcagaacgaaaacggagcgatacattaatacttgattaattaaatattagtaattattttaaaaaataaattaatttgattttttaaacaattttcatatagaaatatttttaaaaaatacaccgtttaacagtttaaaagcgtgcgcgagagaggggttgggagctgaagttctaaacacagccataaattcgttggatgaataagggcggtcctaaccctccatttaggatggtgtctatggcattaactatattgccatgtaggacttttatcttatgtggcactatattaattaagagagagtgaagagaggaagaaactggatctcatgcaagacacagcttcaacatgagaacctatgcactagacactatcaagttttgtattggaaaagaatagtgactttataatagatgaagaataaatatgagttatccctggaagcggcggaccaataatttcaagccccttggatcaatttttcattgatccattatttggtcttgatatgggtaacttttatttatcattcacaaatgaatccttgtctatggcggtaactatcattttggtgccatctttatttggagttgttacgaaaaagggcggggaaagtcagtgccaaatgcatggcaatccgtgggtagaggagagaaatgatgtatttattaatagcccactttaagaaaccatgggttgtagagtatagtttctattgtgatgtcttattgatatggcaccatagacattgctgcttatggacactatgggttgaatgccctaaatctgagggttaggaaagagaggtgtttaatgaattcgtactttctatattagtagagattatcaaatgtgtagtgtatttgtgaaaaatgcatattttaaaacatggttatcgtgacaacaaattatgatataagttcgcattgttcctctcattctttttgttgtctttaatttccagaaatatatcgatttggttagggtagcttccctgaaaaaaagaagaagaagaagttagggtagctgcctcaatttccgattcaagccatagtatataatttatataaaatatttttacttctttctttcttgtatttaatttttttcctcctttttcgttttcctcataattccttttccttgttcacgcacgcaactgttgaggcagaaatgctactgggcgagattctcccccccctctctctacttggtttcttttttttacaccgcattactttcctattttagtaaatttatacacctcaagtttacacatctaaagtttagagactaaaagtttataagtcaaaagtttatatatctgattcaaatttgaatttgaattcaaatatttttcatatatagtatttctatacatctaaagtttatacacctaaagtttatagacctaaagtttatagacctaaagtttatatacccgattaaaatttaaatttgaattatatctaattaaaatttgaatttgaattcaaatgttttctatatatatagtatttctgtacatctaaagtttatacacctaaagtttatagacccaaagtttataagttaaaagtttatatacctgatttaaatttgaatttgaatttaatttttttatatatagtatttctatacataaatttttctaattttttgttttttaaaattttttatggtatactgtagactatattaggaagagaagaagggaaggaggaagggaggagaggaggagatgaattggcaacgcgtcacttgcatacatcaacatagtgaggggcaccgagtgggcaggtccaggtgagcgactgggctagctaggcccaactaagtgctcggagctttttttttttttttctctttacgcttgtgtaatgttggagaatttggttacgcttgtctagaggttttcgttttctttctcaaggaacgacccctcgaattcaccaattcattcgcaattgattaagccacgtggaccaatcaaattctggcacaacggccagcttgagattagtatactagaaaatgagcgctcccgttggcgcgcaggctaacttttagcctataatattatcgtttagattcgaacttttttctttaaattttttaactttttcatcatatcaaatgtttagacacatgcatgaaacattaaatgtggacggaaaaaatcaattacacagtttgtatgtaaatcgcgagacgtatcttttgagcttaattgcgttatgatttgacaatgtggtgttacagtaaacatttactaataacgaattaattaggtttaatagattcgtctcgtagtttataggcggaatctgtaatttgttttattattagtttatgtttaatacttcaaatgtatgtccatatactttaaaaattttgtcacacgaactaaacacagcctaagttacactcctttttgaatgtgtaaatattgttgagtaccacttttatatgtctgtcgacgtttgatgtcgcgattccggtatttgcatagtatgaggatcgttggtattaggatatacgcgagactgaggtaaaagagacggagacaaggatttttatacaggttcgggcccctgaattatcaggcaataaccctacatcttgttggccgaagccggtattgctcttattcaccataatcacaccagtacaatatttggggtagcctatctaactgttgttggcatggtgatctgaaggtctaactcgtggtcgacaacaggttagtcttcctcctcgaatccgtacccggcgagatcagagatagcgctttcgtctctcctgacagtatcctagccgtgcttatccctgaagtcgatatccggcgtcttatcttggtgtatgttggcttgtattggcttatggctttgtggcgtcccctctcctcctagggggtcttgtatttatacccataggtgtcctcttgtccaagtagaactagggaaaccaatatggatacaatccgagtagttcttgtcgtttccatatagaactctggttgtctttccttatccgaaactcctcctatatccgcaggttgtttccgtataggacatggtatgtggtggatactgctgagatttagtcaactactattaggtatgtggtatccataaccctgacaatgtcttctttctttttgccacttcatcaaattattacacatattacttggtatatgtttttttttcaaaatactttcctctactgtaatgcctagtcgacttgtttcataccacctgttaagtttatttttcacataatcaggcagataatatgtagtaataattcagaggataatttaagtgggccttaaggataaaacattgtatcacttttagtttggaattaattaatatattgggttaaaactaacctagtgctaggaataagccaagattttctattgtccgtgacgatggaaaaacctgagtctaggccctgttcttttcactttttctttaaaaaaattgccaatgattattttctccatgcttttacaaatatcaatatattctccatgcttatacaaatacaaattctcaaaaaacaaatcttttattgttttgttcgtacctcttgctctaggttatttctaaattttatttctcaaattactccatccttccacttatatatgaagttggttagttcatttttaactaaaaaacatcatatatataaatagaaggagggagtattaatttatcttgttaatatagtatataatctccctcaataatacgcaaaaaaatccatttgaaccaaaaccttaattgatcagcatagtgttgttttttaaacaacgcatagtgatatctttaaaatactatttattcggttgaggttaagacgtattcacagggattaaaaacgtaaaaaatgcctaagtatggggtagtcacatgaggtgacattccgagtgtttctataatgctcatctctaataccgatatcagggctctatccctggttagagattgggccatgtggcgtcctataaattaagcttctcatctccgaaaatctgccatgtgtctccttgctctccgaaagttcactgcgatggaccaacgaagcttgattttttctggcaaaagcgctcgacccttaatccacccatccctcctcccgatgcacgcctcgccgcccaccggatcctccgccacccgcgtgccgcagcggaccacccactcatgtcctccctcaaggcgcgggctcgtcttcttcaccaccacccggccaccttgccctcccctgcgctccccgccgccatgctgctgcccttccttgacacgcggggttgtcgccatgttgcaggagtcacctcaagcacgcgatagccgtcgacgatacaaacttcggcaagatccattgagcccaatgaagagaagagtagcggtggtggccgtcgacccggaggccggatcaggagaagggagggggcgctagctagcggaggagaggaggcggcgtgcacgggtaagtggtggcgtcgcgccggatcctctgtcacctgcacgtcgcggctatgacgctgcggcgaaccacccgtcgacggcccgaggagcaggagggattgcaggaggtggaggacagggagcgcatcgcagacttctcctcgctcatgttgacggcgctacttcgatcttttagacacaggcgccatcgaacttcctgcaaaggatgccatatactgtccgttgtcgcagcggcaccgtggcgaagatggagacgctgaggagcaaggagcagattgaggaatggagactggagagcagcggagtcgtcgacgactaggaacgggggctggggactgggaaggacaaatatatatatatatatatatatatatatatgactttatttagctgcaagcctgcaactgaagacatcgtacgaacggctagatcaatgtacagacggacggctctgattttttgcatgacgttgccatctaaatgaaaaaacagtgagtattacattcagatagtgtgggggagaaaaactaaagatcttattatatcatttgattgtgctctcagttgacacttacaggctcccatcggatggcctaatcagctaaagaaaaaactaaattttgaattttcaagcttaattttgagatattttcaacgtagtttctttttcaacattggcttttaagtcaccaagaatacatttataaaagttttacctacaaatttatttttattttctaataagccgttttggcttattaggaaataagcaaacgatgcggaccacagttcggctgcacatacaagttgcaatgggcagataaagcctctttgcaatcatttatccaggatataatttttttagggagtatccaggatataattaagtagtagaagagaataaggaggtaccagtatcttttgctttagcttgagctcaacgcaattccaaattttcaaacaaataatttattccttactcttctttattgtgcaaatagaattttttaatgttatgcacttttagaacgttatgtttaaagaataagaagataaaattattttttaaaaaaggattttcttgatttttacagacatgtggaggcaggggtgaagccacacctggctatcgcaggcggccgcgcaaactcaccgacaaaaactccattaaatttatatgttattgaatgaattgatgatgaaatttatataataaatactagaagtatagtttgcttgggctcaaaaaatctttttagctccgccaggagataaaatgaaaatactccctccatccaaaagtctaagacctactccctccattccaaaaggactcaattcttgggttttcgtgcccaacatttgaccgtccgtcttatatgaaatattttttatgattactattttttattattgttagatgataaaatatgaataatactttatgcatgacttatctttttaaaatttttcatattttttttcaaataagacggatgatcaaacgttagacacaaaaacccaggaattaagtttattttgggatggaggaattatttcttttggcaccaagaccaaggagtaattaatttatttacaatgtgacaaaaccaataagcatgtaaccaataagtaataaaatggtttattgggttccgatcaataatttaatttaaaacataatgactataaataggacttaaacttttggaaaaaccaaagaatagaataagttttagacttttagaagaagggagtaagtagtttcattactttggtttcgttggaatttggaatttgtgcgcatatattcgacttccaacttatgtctatgaattcaatgtctcgctgctttaaattaatatatgaataaaagggcatagtttccataatttcaggcattaaatagataaagaaattaagtgtacttatcataccatatcatttactccctccgttccatattgattaccatataactttttcaccaagacaaaaaaaagtattaactttcctatatttcatttaatgtgagtatgtggtagggaaaaatcaagaaacatgcacactttaactcctcttaggccccatacataagagcaggtccaattataaacacatttcgatgagataaaacagaagagagaagagcagtgggctatagatttgtagccagctgtagcacagactccaagatacatgtatgtatgacaggtgcgaccaagtataaattgtgtagtgatgtttataggagtatatgaatttcctactaaattgactatagatgatttgaagtcagtggttgactatactattaaacttgctctaagaaacgatagctttactacctcgaattcctacatacatgcatgcatactcaattttcatgcttaaatgcaataatattacacgtcaaacgaaggggctatgataacatgatgatcaatttaaaaaattcaatttgtgttaaatgatgatcaatatgaaacggatggagtatttcataggcaaagccgcgtctattttttagttctttctttcccatggtgcttctttttttcaagacatttctctttctctatattcttttagatatctcatcccagccaattctgcattcctatgagcacgtacaccaagctcgaactgggaaaatactaatggttggttgatctggtaatagaatagtttggtgtacttctgtttggtgatgacttgagcagataagcaaaggatacttgtccatccttccaaaaatccactgctgcctgtgcacctgcttcgcatggttgagcaagttatctccaattcagaggtttgcaaggctgcaagcataagaaacttctattttaacataaatcaaaatttaaacatgataagaggtcatcaatagaacaataaagtaatacatcaagcaattttctgaataaactatagagcaaaagtatacctgcaactgcagcttcttcataaagcaaggtactagtaccactccttcacagcttgagccagaagggcccttgtcaggtattcagatttcaggtgtagtgaattacttgcaagaaacatggctggtcattataaagagtgttcatgaattctaggcatgccatggcaggaaacaatagccttcttgccatggactccaagctctccatgctcttcttgttgctaggctttgtggcatgttctgccactgctagtcaccatgatccttccgttgtcggatactcgcaggaggatcttgcattgccaaataagcttgttggtctcttcacatcatggtcagtaaaacatagcaagatctatgcaagcccaaaggagaaggtcaagaggtatgagatcttcaagcgaaacctgaggcacattgtggagacgaacaggagaaatggcagctattggctcggcttaaatcattttgctgacattgcacatgaagaattcaaggccagttacctgggactgaagccagggttagcaagaagggatgctcagccacatggttcaacaacattcaggtacgcgaacgccgttaacttgccctgggcagtggactggaggaagaagggagcagtgacaccggtcaagaaccaaggagaatgtggtaagctcaatgtctgaaaaatgcacactatctatttagcatagtgatactgaatccctgaaaatgcacacgatctattcagcatattgaggccgaatgcctgaaaatgcacacaatttatttcagcacggtgatactgaatccctgcacacaatcaatttcagcatattaatgctgaatgcctgaaaatgtgcacaatctatttcatcgcatcgatactcaatgcctgaaactgagagtgcacacagtctgtttcagcatattaatactaaatcactatctgaaatagtgtatgatatgatgcaatttgttccatgaaaatgctgtaagagaaaacggtctcttgcaggaagttgctgggctttttcaacggtggcagctgttgaggggataaaccagattgtgaccggcaagttggtatcactatcagagcaggaactgatggactgcgacaacaccttcaatcatggctgtcgaggtgggctgatggacttcgccttcgcatacataatggggaaccaggggatctacacagaggaagactacccatacctcatggaagaaggctactgcagagaaaagcaggtagaaacatgaaaaccacttcttcttcagaggcaattcagctgtaaacacatgtagtgatctagcaggatctctaacagttgaatttatctgctgtgatgaactgatgactggtggttagcctcattccaaagtcatcaccataaccggctacgaggatgtcccggcgaacagcgagacaagcctactgaaggcactggctcatcagcctgtcagtgtggggatagcagctgggagcagagactttcagttctacaaaggggtaaacaaaattatcagctgttcttcaatcttcattcaccatgatacagtacagatcagcacaaaaacattaaactgacaaaatgggtgtatctgaatactggatgcaggggatctttgatggggaatgtggcattcaaccggatcatgcactgacggccgtgggctacggctcgtactacggccaggactacatcatcatgaagaactcgtggggcaagaactggggagagcaagggtatttcaggatcaggaggggcaccggcaagccggagggagtctgtgacatatacaagattgcttcttacccaaccaaaaacgtcactggctggggttcatagctagttttgtaggcgatcttgtaatccatttgtctctgacaagaaagaaccggcctaagcaacgctgtgcaattcctggatgcttcggagtggagctcttaagcagcacagcaatggtttattatataatgacagcttgggtttttaagcaaaatggtcccatggtctagtggtcaggacattggactctgaatccagtaacccgagttcaaatctcggtgggaccttgatatattcttttattttttttgcttctcagcagacatttctcgtctattctcttccgtatatttttcacattttattttccctcttttctcctcctcaggtcaataaaaaaattgtcagcctatattttacacattttattttccctcttttctcctcctcaggtcaatcaaaaaaaattgtcagccacttttcacatttctcgtctattcattttcccagacatgctttttaaaaatcacatccagttcttgtttataatttttatttaaaaaatcttatccacaccactacttttctccagcgtctgctacagtgacgcaatcatgcaatcatttgcaatgaaattttctgatatgaaagccatgatacgttccaatttacttcctcctttttttaaacatataatactgttaatattttaagatagtttaaacattcatcttatttaaaacttgatttattattaaatattttttaagcatgacaaaaatatcttaatatttacataaaaattttaaataagacgaatgtcataaaagttaataacgtcgtatgttaaaagacagtggcaatggccctgtttggatccaagggatattttttagccctccctaaaaaatagtccaaatagccaaaaagatccaaaagggtgagctatttggaaataacccactcaaaaaaaattattctacccaaggggtgctaattgagcctatttcgggtggggctcactgaaaaaacgtcttttctctctatctctctccataggaagatacataaaagcaacccttgaatccaaacaacttagggctatttttttagagggttattttcttatctaaaaaatagctcttaaaataattcttgcctagttctacaaacaggttggttgtttatatttttttttagaaaaaacattccgcgtgggccatggcccatgagcccatgagagataggcctttcgagttcccatccgacgatctccacccggacaggtagtaaagcgcggtcgccgtcgccggcgacccatacagccatactgttccactcgccctcgttttctccgccaccgagcgcatctcggcgtcggcggcttggggggagagtcagagatgcatctgagcgagaacgaggggatcgagggcgtgcggttcgcggtgacgggcggccagggcttcgtcggctccgcactgtgcctcgagctgctccgccgcggcgcccgggaggtccgctccctcgacctccgcgcctcctccccctggtccgaccagctgctcggcgccggcgtccgcttcttccaaggtccgccatctcgagttcatcctcactacagtggttttggcttttccttcactgtaactgacgcggtcactgagttttttcttagaagtaagacgcactggagcgctagcgctgcgctgctttgcttggctatagttctacctccggatttgttgctaactagtgtgaaattggagtaaactactgcctctgtgctattagctagtacatatgttttggctcttggagtagttagggaatcttgaattttgttttctcaacacagtgacagtaagttagtaacaccaacaatacccatgatgtactgcgcataattgcctggttagcttgttaacttgtgtgtccattgcagtcggctctgcatttccgatgcacgaattaagttatcaaatacctgatcggtgaacctgtgttgcaggggatgttagaaagaaggaagatgtggggaaggctttgcgcggtgtggactgtgttttccatctcgcttcgtatggcatgtcagggaaggaaatggtacaggctgggcgagccgacgaggtcaatataaatggtacatgcaatgtgctggacgcttgccacgagcatggtgttagaaggctcgtgtatgtaagcacgtataatgtggtttttggaggagagccgattgtcaatgggaacgaggcgctgccttatttccctgttgaagaccatgttgatgcctatgcgcgtagcaaatcaattgctgaacagttggtgctgaagagtaatggccggcaaactaagtaagttgagccatttttgccatgattcttatgtctgcctcattgccatgtatatctgccacttacatacccttcatataattttgccgggtcggccgatacccttcatataatatcttcaaatgtgttgttttcacctatgatgagcgtattttctactttccatgtgtcaagatccaccaccaattatttcattttggcttgggacttaagttgaacattggtaatatacaggctgtcttactgatttgatgtttttatacaggagtgataaaagcagtcgtctttatacatgctcaatacgtcccgccgctatctatggtccaggtgaagagcggcatcttccaaggatactatcccttgcgaagttgggattagcattcttcaagattggggatccaaatgtgaagtcagattgggtctatgtggataatcttgttcttgcactgatattggcaagcatgggacttttagatgatattcctgacaggaagggaattcctgtagctgctggtcaagcatatttcatatgtgatggtaagtgcagttagcctgtagggcaactatattactggttaaccttttctgataccatggcactatgttctgaattttatttccatcttttgaataggagtgcagccatttttatttttgtcttgtcatattgataaatctgaactgttgaacactagactactaagctgaatgctaccataaaaaaacagtagtttacactcttgtgttctgcattggtgtctttgttgaggatatctattcaaaatgatttactgcatagctcgttttagctatttatttgttttgcttattctgaggttgaaaccttttttcttttagagggagttgaaatttttattgcttacagatcatacgtaatgagtctactggatgctctgttgaatatatttacattcaatactgaaccattactcctttagcaacttgagcaattacacttatattccttaccagaattgctcttaatgtttgttgtttgtaatttgaaagaaatgttgcattttcttaacaagaaactattggttgtttgcaggatcgcctgtcaatacttttgaatttctcagtcctctatttcaaagtttggattacacagttccacgagttagaatggatacctcagttgctcttgccatctcaagattttttgtgttcatgtatacactactctatccatggttggatagtaaatggattcctcagcctcttctccttcctgctgaagtatacaaggtcggcttatttatcatgttccaatgactttacctaatgtagtccattatggaaatatgcctttacactgttactatcttctcatgtgacggcaactctgttgttaatcatgatgagtgaggggtaataagatctaatttgtttggtaggagtttgaatcttgttaagcgtaatatagtgctaagatgtaatgatggatgtgcagtattgcttacagctattttatccttttttatatataaattaatcattttctgttgatctttagtaatttcttgactaggcaagtagaaatgtagaattacataattgcaattctatttttatagctgagtgggaataaacatgatgtcaaacccatagtcgaagctaatgttgatagttcgctgtgacaggtgggtgttacacactacttttcatatttgaaagctagagaggaaatcggctatgtacctatggtgagcccgcgagaaggattggctgcaactatttcctactggcaggagaggaagagaaaagaactagatggcccaaccatatttccttggctgtttgtaacaattggcatgctggcattgttttctgctgcttaccttccacccgtcggtccattgaaatgggtgcttgacctccatttatttgttttccgatcaaagttggtgattcggttagtctttgtgatagcaactgcattgcacgttggtgaagctgtttatgcttggttcttggcaaagaagtatgacccgaggaatgctacaggttggttttggcaaacattcatgctcgggttcttttctcttcggtatctgcttaagagaatgagagagtagatttgtgctgttattcccttcactttgtcaggaaatcttcaacagtaatttctagctgaaatgcctcagcatatgcacttttaactgctgtggaacttcatttttctgagtcatatgtgacttctgtcagtcttgagaagcagagtgtgcagaacccatggtcttctatgatagtaggtattcagccatggttttcgatcttgcatgaagccaaaccacacagcacattgttagagttgcagcttgtaccattagcttagatggcatttgttttgggactggagagaacaattgaacataatggagttgtaagttgtcattgttacaattggcatatgtttggaggctataccatactgtacctcctatgctttgaaactgaactataaatcaataattggaaagctgaacaaaagccagcttctcttgcctgtcagttacgtacatatacagcacaaaccctgtcttttgccaatgcagaactggagtactcttggattggtctttgttccttctctgcagctatctacctacctctgaactggaagtcccaagaactacaagcatattacagcctgatggcagagtgacgacaggtcagttaaactgcttccatgagaaaaatgagttgttgcaggcttgcagctgtgttgtgcccctccactcgtctgattcttctaccaacctcgcaaccaacctttgcccttcatttaataaaagccagtgtcggcggcgagaggaagcaaccgaatgaaaagaagaagaataggtgaggtgaggcccgagtgttattatcggagttggacttgtgaacgacttgtgaactgcagccgcgcaatccgtcgatttgtgtgtggctcgcgtgcttcttccagatcacatttcaggtcccttcggtttgactgtatgagatgatttttctgtcgaatgaattggcgtatgagataatttttctgtcgattgatttttcggtttgactgaatgggatgattgcacgttgccgcaaggaatatatggtgtaagtaaggtcaaagtcctctgatcttggaaagaattgggcagaaacatatcgtaggaacaaaacgtgacacacgcttgcatttgtgctgatgagaaatgtaggcatgcagtttcagtttttgcattgtactgatgagaatgatgtttgtgatggttgcaatggctggcatgtttgattgtttcctgcgtagaaaaggcagagtccaattgctgaaaaggccttgaaaagtctaggtgcaaccggaagatgacaaacagcttcggtaggaagagggagggagcaaatgtttcattggatgattccttcccccatgttctcatgtgatatatacccttttgcttttggtgacacggcagctgcctctcccgtttgtttgagtattagatgctaaccaaacacagaacaccctttcctttctgaaaattagtgataatcaaaaggctccagtgaaactagcaagaacaaatggaaacatttgcctccttatgaacactgaacacagttaaaaacaccgagcacaaaggtatatcacactgtgaccctccaagaagaatcagagtaggaagcttatgataaaaactgcgcaatgggatagacaaggactgaaaaccttcagtttcaggttttctaaaagacaatttaaggtatttcaatgtagattatgaagagcatcaatgctgtttgataatgtatcctaggacacacactacatcattgagtgctctttcaccacattgggaagctttgcatcgatttggccagaatcaacccaacatattgcaatttgcaagagagtcaaatagatgggcaggcaggcaagacgccacagcccacatggtggatggaattcatcatggatgtcaaagccccagagcacccagcaaatcggcaatccaccccacacatggcacggtggcagcgccaccgcaccggcagctgccacccacccatcatttcgccaacacggctccagtttatctgagctgcctaaaaaaaaaagaaaacaaaaacaaaacagccaaaatgttcagttcacatcgccggcttcggcgcttcgcctctctgtaaacatgctcgcaactgcacagcacaaagctttcaactacacacacctcgtcgtggccccacccacccctcttgcatgaataaaaccagcctgtccaggccatagctgtgaagacaaacattgcgccatcacattctcaagaagaggagaaggagagatctggagaagaagaggtaggaggccattgccacctgaccttctcctcttcctccattcatcttctctttcttgggacatggcgaccatcctggagaacatccagaaggcgaggttcttgccgacaaggccgctcaaggacgagctgccgacgttccagggcggcggcggcggcggtggcggtgggggtggaaaggagagccacctgatggggctgaggaagaggctgtcctccttctccgacaagatccagcccatctcctccgcgtcggcggagtgggcgttccggcggtccaagtcggcgccgtcgctgggcgcgttcgccggcggcccgctgaagcggtggtgggactggggcgtcggctggctcatgtccaagaagcccgggttcgccaccgacctcgagatgaacgaggaggaggtggccgccctcggccgcggcagcaggggcagctggggccacatcctctacaagatgcgctccggcgtccggcggctcgtcacctcgcactcgctgcccaccacgcacagggcggcggcggcggcgtcggcgtcggcccagtgcaagccggcggccacgttcaactacacccagagcttccacagcgggcaaaccgccatggcgtactgagagcttctcacatgttcctccagtgagaaacatgaccttttcttggtcgccgtctccatgggatccaaatgaagaagaagctcagggagattgatataatatatggtgatgaagatgcaactacgattacatgtaaaattacacggtaaatttgatgaatgatgaaaaaaaaattgtagctcactacgtgatctgttttttgtgtagatctagtgtcctgtagaggccgaatgtatgttcgttctttcaattctttttggagttcgttgggcgatgtaaatgtctccggtcaaattccttatgcttttgcctcctgcagtaaataaaaagctaatgaaatatggtgcttgtttatttgttcttgggatgatcttgcagagtttcagctcagatctgagttctcattgtaatgagctaccatctttctctttaccatgatcattttagcatctttgagtagttacatgtgtttggtgtatgaagatcaagaatagctggtgaatctaacaattaatctcacaaaaaaagggagattacaggtgaggtgtcacgactgaacaggtaggcaggaggtcggaatctgtcaccatgtgtgttagtattacatcatgaaagtgtcctcttgtgaagcacaagaaaattagtggttcggtgagagtggcacagttttcatttaggcgatgctgtactttttgctcgtgcattcctccagccttcgatggagaaaggaacggactttggcccataaaaaccaggcccaactggttacaaaatttccaatctcctggcttccaaaatggatcgtgcacgaaagctggggcccaacccaacccaacccagcccaagtcgggaaatgacacttccttttttgtttttctcttttcctttcacgttgttccatatcccccgttccgttcttttttttttttggaaaaaaagttcttgtctctcgcgtcacgttgctcgctgcgtcgctgtcccgtttcgacggttttttgtcttgatcgcggtagcggtgtgccacgttggtcccgtgctaaacttttttccgttttgcccctcacgtttccgcgaaattacgtgccttcctcgcgtcgctttctttcttcttcctcgtctcgcctttccctttcgtgcaagacaaaaaaaaaaaaaaaaaaccttccccaactcacaacaaaacccccccaaacctcgagcgcggagagcatcccacaccacccgtcccatcgcaatccaatccacgagcagccatggcgagaggaggaggaggagggcagcgagagggcaacgcgctgaagacggcggtggtcgtgaccggcggcctcgtcctcgcctggttcaccatggagtccgcgttcaagcccttcctcgaccgcctccgcggcgcgctcacccgcaacaccgaccccgcgcgcgaccccgacgaggagaactccgctgccccggcggacagggccgtcgaggagcccgccgcggcggcggccccggtggaggagggcgagggcaagggggtggagctggaggagaagggggaaggggccgccatgaccgagtagaagaagaagaagaaggcgacgtgacgttcccgactggttccgctactaaaatatgctgtgaattatgttttgtgcttcccaatcttgtcctgaatgatgcaaaattttcaattctaataccattatctgcacctgtagtactcatctcagcctacctgtgtgcttgcgttagtttctagtgacaattactgctgctcagctaatatgtagtacttttttgtgggtgcacttgttccccttgaagctgcttgcgtgtgctattgataagaaaattttagtagaaaaacagtgtttctctagaagctgctggcttatgctattgccaacgaaaagtgtgaacatagtggtaatctagattttgcagccccagatgcttcattcattatattgtctgtcatgctagtgtgaaatgattgtagagtattatgcaatgttttaaaaagcggtaagcggtttcgttcggttaccccaccttgtagtgcttatgtagcataactggctgcttatgcggtataatcgaccgcttatgtgtcttaagcggtacaaggttggagtacctgttccttgtatacgtaagcggccttgtagacattttgtttttaaaaaaaccctggtattatgtcctttctgagattagcaagctgttatgtgtgccacccactatatggaggtgatcattcattctgagtgtgacaaacacttttcctgattgaactaggcacctcatctggttttgtttcagaatagtgttctgctgcctgttagtcctgtctgtgtacttctggggaactggggtgtgtcatgggtgatgctgctccagataaacctgtatatgtatctgtatgtagccagctcaatccaccgtgtgattgctaattgcattggtttctgtttatgtgtgattgataggtgttttgcacatgtgcatacctttctttagcccaagaagctttttccttgtttttactcgtctcagaaaatattcggatcagcatagggggtcagtcttgtctcaacaaatggttgagtcatttgcatctctgaatcagctattgtgtattcagtgtgatagcataaaacaattgcccaatgctaaatattacttgtgcaattcctgatgcagtatacatgtgaaattgaaacatcatatcaggtaatttgcatcgttcctttgtaacttcatgcacaatatgtggttcctcctcttaccatatatgaaattaaagataaactcgtggttgtttcttcatgcacttgccatctgcagattttataacaaagctgtgaagtggaagtagcataatgtaagccgatgattggttcctgagatatctccaggaggccagataatttttttttccatgtctcggatatgacatcagaacatgatatttggttttttagcatgattatgtcataggttcatagttccatgcttgccacatagttcatgcaaatttgattattggatgtttggggagcggaaatgtgcaattgtttctattaaatatgtgatgatgtttttattaagtagagactgtttctgcatttgctcattgcgacaaatcgatcagtagatacactagacacataaaggttgaagtaacactattatttataaaagaataaatgaccttcagagatctttctatgataaatcttggctgttttggatacgacatcgaaccacaagtaacattatgttggtaccatgattaatcatacttcacaatgcatagtattggctgctctcagatgaatccaagttattaaagttttgatgaagtagttgtgctttctgcatttattctgctatatatgcaatgaagggtaattggtgctgacatggatttctttgactacagtggcgtcattgtaaaaagaactaaataaaccccagtttcgttacctgattgagcaacagtattttgactcaagttgatatgtaagctttctactaaatgtcccaactgtagaattatacaatatttagcagttaaactgatggttttctattagctgttgcagacgtgtttggtcctttgtgcagagagtggaactcttataccaacttagaaaggtttttggtttttctttatgtggatataggagatagattgtctgtgtttgcctcttttgttttactaagtttactgatttactaattgtctttgaactgttatacaagtaactgaatattagcgattataatgtttgacattgtaatgggaagtaattgttgctacattataagatatattaccttaatgacttatttgattttctccacgcccaatgatcgcatctacacttgttcttgtatttatcaccgttggtagcctacgtgtaatctgtgcactttgtgaaaaatggcaaaaacttttgaaacattccacccggatacctttaaaatttgtacttgtcgaacgagaaagcataccgatgtatgtctgttcttatgctgataatgcattgttcgtcttattttgttcatttattctgtttttgcctttgcatgaccatgacggatggaagtttcgaaagttcaggtgatccttcatcagtcccagaattttagtatcatgtatacgctagttttggattagtgcagtgttcgatatattaatttcaagcaatcagcactctacaagggtagaatatgcttcttcgttaggttgccataccttcgttagtgtcattcatggtcgatctccaatatctctataaggttttgtgctgttacttttgagagatggggtctgctaaaatgtgcactgtgcagtagtaccaaaggtccaaaacacacaaaggtcacagagaacaagagaagttgtgctggctccaaaacgttcgaaacgttcggatagaaggttgtgaacttcttccctacgcacgtaaaataggataattaactcattagcacattattaattaaatgctattataacttaatagtggattaatatgactttttaaaacaataactttcctatattttttctagtaaaaagcacaccgtactgtttgagaagcatgtgcttaagaaaaacaagggagtagaagttgacaacatatagttccgaagacacccttagccttggcaaaaaggctgtatttttacaactaagcccttataaaaaaatataaaaaaaagatagcacggtgcctaggaccctattgcccgaaaacgtcttggcacctaaatcgtggccgcaataccgccctacacatttgcatggcacccgtctctttgacgctaaggtcggcacaaaactaaattatcatttcaatttgtatgttttttttatttctatccaattgagacaacgtcgttggtgctgacctccgagaagggactgactcctctctctcttcaaatctggttattttatcaattgattttgtagcaaaattggttttcaaaattattttctatttattggatgaagtttgagattgggatggaactttaccttcgagatgggacaaattccctctctcctcaaccagtctattcacacatcctattgatgtagcattgaatgttatagtgaaattgacaaagcaaggtatcctctccacttatttcaatctattttcatttttattggatttagagttcagaatgaaaccctaggaagtgtttgtttcataagcgggagtatgtgtgagaccgaaggtgtgggatgttggtgtcaatgagactaatgtcgacccgcatctatgctagctccatgccaagggtcaccattggccctaacctagcgccaaaacttggcacaaggatcgtcgacgccgagctttgggttatgtctagaataaattttatagagacatgcttataaattttaaaaggataaaattgttaaaaatgtggcatcgtggttggaggacgactttactgagtgaaagaattataagccatataccacagtcgatgccaccaggtaaggcatcggtactgcaatatctagttaagcgaagaagtctatctcgatagggtggcttaaagtggggttccaatgaagcatcataaacttatactaaacaatcggggctagcacctttgtcagtggtgtcgccaccaccggagtaggtacttgcaggaggatgcatggccctctcgcgcctagaagttccacgtattgtaagaacgacatacccaatgccctaatctcgttccagtgaatcgcgtagagatggttgcacgctaagggtgtggcatgaggaccagatcatgtgacaaaccggacagtggtaaagccttctggttaggcaccatctgttgctgtgaactttgtgctatacaattgttggaagcatccgtggtagcggatgccaggagccaacttaggccttattcgttttgaaggattcctaaaggaaatctcaattcctttggaataatcactattcatgcatttggtttgtaggattcaaagaaaaattttccataggaacactatgccaatcctccaaaatgtactaattccataggaatgaaaacatccactctatcatcttttgtttaactcagtgtagtaaaaattcctgtgttgcaatcctttgttttgcacatgcattcctacactattcctacgtttttcctgttcctgtgatttggaaatcctgtgaaccgaataagcccttagctttatgcccaagggctttgggtgatcggactgaccctagttggggttgtttaaatagatgggatgtcagcttacctgatccttgacagcttacctgcatgtgcgatgccagccatcaagcttccaaaaggaacgattgaagacttagattggatgagaagagcatttctctggacaggggaggatagctgcattggagccagatgcttagtggcctaggattcaatctgcattccaaagcaatttggaggccttggtatcaaggatgttggccgacagaacaatgctctgctcgttaaaaggctgcaccatcttcactcttcagacttgccttggtctaaatggatatgggcggaacatgcaagtccgaatctcaacgaacagaaacagctagatcctcactgggaatcaacgaagcttcttctcccagtcttgcaggatctcacctcaattcagattggcgatggccgacacacctccttttggcatgattgctggtgtggagaagacgttctggcatataagttaaatcctctctatacccactccccgaataaacatgcatcggtgttccaggttcttgctgaagatttgcggaatcacttcgtcccgtgcctctcgtctgtggcagaggatcagttcctccagctttgcactctcctccaaggacacatcagctcactagatcaagatgttaggagtaagcgaggtgggggtggcatcctgaagtcgaaacaaatctatcttgctgcatgtaatgatattgagccttgtgcaaattggaagtttatttggaataacaaagcgcctctgaaagtgcaattcttcacttggctgttagctctagaaaggctacataccaagagcaacttacataagaagaaaattgtgcagtccccttcgtgtgatctgtgcaattcagcaactgaaactgcttcgcatctgtgcttacatttccccttcactgctgaattatgggagctcctcaacattcaaatttctatctcgacgaccaagcagctagctgccctactccctcctgcgcaaatcccagcaagacactacaaggtcttctacctcctttgcttttggaatctgtggaatcatcgtcatggagtagtgttccgaaatgaaactgtatccttgtatcgattgctagtgaaatgtattgaggatgcaacactctgggcagacaggcttaaggtagatgatcgatttgtggtctctgcttggaaggacctcttttcttcctccctatgatctctgaatacgtaatagctatgtaaaatgactcataagatgggatgccatcgttgtgtgtgagagcccttcctgaaaagtgataggtttttctaaatctagatacttaaaagataaatcctgaaatttctttgaatattatgcacaaaattatgaaaattaaaagacagtacttatcgatcaagtgtattgcacacatataaggcttccatgtctaaggccaagtataagtgtattgcacacatttaaagcttccttgtttagggccaagtataagtgtattgcacacatttaggccttccatgtctacaaattatcctaatataagttgtgtctgccaccatattttagtttttcaaacaagcacaacccatccattaagaaataaatgcagataaatatgtctatatacctgcactattcataataaaatttgtatcccccttatcattgatcaagtttacctttgatttaaaccaacttctactagctcgccatattaattcatgtgttaatgcgcgcattagttacttccttcttttcattagttagtcataaaagaatttcaggatgacaattatcctggatataacattcaacctgacgctgctgacagtgctgcccatcgagtgacggcgccgaggtgtgaagcagcgttagctagctagcgaggtgctcaggtgcacgagcatgccggctttatatagctaggactctactcctatgttcaaacaggaaacatgtaattaatgtttcgacgagacattaatgtctaatgtgagataggattcgtgatcttcgacgccaggggttgatgttgcacatgccaaagcagcgttgttaattaacagagtgtgtctaaatggtgacatctatataatctcgcttactcgctaggttaatgcacgccatatgttgaagagaatggattagctggatatgcaccaatgttttaatattgattcccttttaagttagctagtcacggatatagacacaatgtatttatacgcccttgttttatttatgaatttatttatgttcgccattgtctattttatgcacgaaaaaatatgtttgcaacataattatgtggtactgcatgggtaaaatttgtcacaggacacttaaaaaatacgatctttactgggaacactataagatagtgaatttgtccgaatacactaaaaaatgtgataatttgccacattacatatgttatctataacagctccttatttaagagccattattgatgacctaaggacatctataatgggtcaatttttttcaagccattacagatggtagtaatcatctttgtatttgcaactaccattacctctctacgtcgtcttctctgccgccctggccacctctgtgagtaagcaaggagcgccgctgactcctcctcctcttctctatgtcgggcctccgttgctcccttcccgtccctagcgtcgatcgctgccttgtcacacttgaagaatgtagataacctggggtggtgtcgcctaggctgtgtaagctaggcctatgagagcctaggtgttgcatgggcctacgagcctgaatatggggagtatataagggagtcatattgtgtaaaccaatacatcgaaaaagaaaaaatagaaattgattccctccctagtctcgctttccacctttgaatcttcttcttcccttggaatccgatgattctctttcccatttttgtccatggtggtgatcagcggcagtgtagagcttcattccttcatctcccattaccagcggtggaaattgcaccctcctgtttgcaccaccaacatgtcaggcaatctgccccacgctagggtccggcggcggcttgccccatggagcaacactgccacaacaggtggcctcttcggctgtccatccttgagctttgaacgaccaacaccatcaccagattcaccacaactagatggagcagcggatccagcctcaacagttacaaggagtggcggatctgtccttgatgatggcggggtgagatggatctggcctcggcgatggcagtccatggcggagatccaaccttggtaacggcggggagtgtgactccttttcctccatcgtgctcccatatgctcagcggcagatactgggccgcttgagcttcagcggcagcgtgcgttggatccagcctcgatgacaacggtgtgtgaaggatctggcttcgacaacaacgaggacgacatcgggtggtggattctacttcgatgacaatgccatggtgatgggctagggctgatttttcctctttggggtagaattcctgcatcagtaaagactcatcattagagccgttacagataactataaacatcattgactataattctgtaacaactggctgactcattacaaacaacaattttgagccatcagtgatgagaccgtgagtgatgagaggtctgttgcagtgagagagatagctcatagatagagatatatatatatatatatatatatatatatatatatatatatatatatatatatatatatatatatatatattaaatttgtttggtgctccatggtgcccgggcaccattgttgaaattgagtatatacctaattcaaatgagtatgaaactttttcaattacttagatattaacattagctactttactaactagttcaaagcaagtttgaactgaatttgaacttgtttttgttagattttgattttaggtatatagcatccatacatataattagttaggtatgtaatcatggattgtgaaataaagttaaatttgagttgttttgttgataggtataggtatgaatcgagttattataactaggtatatactcacaatttgaaaattttgaaaaatttgagtgattttgtgtatttgataccatggtgcccgggcaccatggtgccccatatgagtgtcctatatatatatatatatatatatatatatatatatatatatatatatatatatatatatatatatatatatatatatatatatatatattatttaaagagaaaatatatatatatatatatatatatacacacacacacactgtatcagtgactaggatgaaacttttacataatcctcctcgatgtgttaactacatattttttctctttaaataataatttacaaaataaaaataacaaaacaacaaggaattgaaattttagatctacaatttaaattaaaatatttttaaaaaaatatatcatatatgatcaaatccattacaataaacaacattaagtttgaatagtttaggagaagttgtaaaaaaaacaaaaggatggttctgaataaaatcagctcaaaaaataataatctagaaaaaaaggtttagcaaaaggccttaaaggagcgaaggtaattatcagatttccaatggaagttcccttcccgcgcaattcacaaaattaaaattaacattaggcctaatttagagaggcccaatgtgagaggcacatgaaataaactggaacaatggcccctcctatgggtgagcaactgagcatgcatggtttctgcccatccaatggtgactgtgcatccatatcatgtagatgtctacctataaaccaagtggttaggtcattgtataatttgggctaatacagttagcaaatttttaccacaaaaaattactcaaaattccatgataaactttatatcataaacttttgatgtataaacttccgtatgcaataacttttatgtatactctttggtgcataaatattcatgtatattcttttgcatacacactttgggtgtataaacttgcatgaaaaaaaaagagcacgtgtcgacattgttacctaaaaattaaaatgagttgtcaaggagcatttgtcgcagccgcacgtgctcgttggcccgttagcccgttagccctttcacccatccctctagcaccatcaagccagaaactatgcatggttgcatcaatgatgatcagctacatttaattaagagcatactaattagacttttaaacaatattgaaaataaatgttattatgatatcatggaaaaaagctgaaaaaggagggttactcgtaacagaatttactttgtgtaactagggtataaattgaggttagtaatcttcattttatcgtaatataatatagaattcaacctgtgatgggtaatgaataccctaaacaaaaataaatacttacctgaaagctaggaaattaaaatggcgcgaacatgcaagccaaagtaatatggtgccttcttctctttttagtgaaaattcagtttatcatacatgacaattacaagatatgcacatttgtaatataatgtaacgagaatgatatatatcctgtagttacagtattatattacacacaatgttatactaactcgggacatggttgaaagtgaaaccagagcgtccactattatttttttctgttcatgaaactatggaagtgactttcacgtgccatatatatatgttgcttcaagttaataacgttaagttatacatttgctttcttaccccttttctttttttttgagggaatttgtagccttttttcttcaaagaacttctccgtcatattcttagcatttttttatttgcttagagttgttctagttatatatcatgtaatgttgtagctagatatattgatatatcatattaattaacagttttcatggacgattatctggataaagcttacaaatctatctccagccttgagatgttggttatctagtaggaagatatgatatggatgcatggtgaaaattttataagaccgtgaaaaatcgctacgtgtgatttaatttggttcttgatttaatatatattcaccatgaactgaatagtgagttggagtactggccacgcggtactagttttataaatttgagaggtgaaaactatacactatatgtatacaacacttgcttcagaccggacaaatatctattgccatatacccctctgtgtttatgtctagcttcttttctttttttttcttttactttcttatattcttgcataatgctatctattacaatgacatgagcaaacttttttttaatatatatatataacggaaaaagagcagactaattatgccgagaccaggagtacgcatgctagctaagtgctttttatttattttttttaaggagaacgacggcaggagatctgccagaatttaaattaggggaggtgctttttattaccttgatgttattgataacagaaacttgtgctctttcatgcatgccatacactgagatggaattcaatttacatatgtgatatcatgttcactcgaactgtcaactaaaatgtacttgtagcccatgatctttaaaaaaattgtttaagcagctatttttatttctttatttgttccaacttccaaagagatggtacaatgcaagacccaaggtacagtgaacaattaattaattatgcaatacaattttggatacttatatatagtcgcactatcgcgagataccaagatatatatcggctgctaaagtttttatttgtttgtcactagatctaattaaaacggccgctcaagtgcttagtttgatcaccatgcttttacgaagaattatgtggaatcgactttatgctgatctgaagagttaatcagaagaatatgtcttctgttttaacgaaaattacatatatacagcaaattagaatttttttttaggaaacatgcatgaaagagattatcatttattcatctggatttaactcaaagttgatgatacaaatacatatatctgtaaaaatgacatgattgaaattaatcaaggaaacatacatgcttccattttctggacgctacaacataacaactaaatatccctattcggggagctaacatgaattctggatctagtagctttcaaaggaactagaccagaatatcaagttcagatgactctgagtctgataaatttgagccactcaccatggccggtgcaaccagctcaagcgccgacacaacaatgactggtacgaagaagtctatctcaacaggacggcttcctcccttgcggtactcctcccagaaggcaaggttgggaggaagtgggacaaacgagttttgtactgttggggttggcatccgtgcttgtggcaccactggggccgaggtcggtggccgtggcgggaggccgaccctcccacgcctagaagcctctatgtaccgcataaacggcgtcaccaactctacagcctcgtttgggtgaattatacatagatggttcctaagatcttggcacgaatacaagatcacaggaccggggcacaccggacaacgatatagccttccggcagataccggtgcacgcggtggccgaaaacttggtgctccattgcctaaagaagccatggtggtggacttcgtggccaaaatgcttgcacggtctgcggtgttttgtgggggagtactccctctggtgtgtgttttgtggtttggtgctgtacatctagggccctttataaatagatgggatgtcctcggactctctaggattaaattggatgggaatcccttcttaattaaaaagtgcaaatattacctctattaactattacatatcactactgactactgaatgcaaacgaagcagcaaattaagagaagataaactgattgctaaagttagctatatgatcatctcttcacgcggttagagataaaaagtcacctgaaacataaatgctaatcccaaattaactaaattgcactacgaaattaagtactccctccatgcataaataattatcatataaattttcgttgatattttttagaaacaactgagtttgagaaaggggatagagaatattaggaagatacgtaaaacgaggtgagctgttagtgcatgattaattaagtattaattattttaaattttagaaatggattaatatgattttttaaaacaactgtcctatagaaattttttttaaaaaaacataacatttagtagtttgaaaagcgtgcgcacagaaaactaaacaaactctcactttttgctgctgccgaacacagtgagacctttctgtctctatctatgcgagtagtagcaaaaatgaatcggtgaatgcatgagcatgggaccgtacgtttgcatgcagtgcgtcacgtactttatcgttttacctttgtgcagtacattgcgcgtttaccaaaacaatttttttctttcatcgatacgctaattaaatgaagtatggatcaattttgttttctttggtcttggtgtaaacaccttatatgttgatcaattctgaacggaaggagtagtacgtatagataatttcatcggccatccatcgattctccaactcttcatggatgtactaacataggagtatatcatagaggcgttaatcatgcatgttcacattacacacacacatctcctagtcattagtcgatatattttcttgtttattcaactataaatgtatgtggtaatctgtttagaacaacacgaaagatggagtattaagatatgtatggttaacattatgaacatagatgtatatatcaagttatcaacgcgacaatatgtatatacatgtttaataatgaaaatgttttgcattctcggcgtatattgtatggcacaaagctaataaaatttttgttacttaaaaaaaaactaagtgtgatgggagaaaaccccagctacccaaagaaaaaaaaaagctaaacactagaaagaaccaattatattctaacaaagtaagcttataaatactgcattatccataatggaatggagatccttatgcttattgtggtcgatggcccttttgggctgatcaccaccattcgcagtaccatacatcgacgttagcacaattctctgacagctttatttgatgtagtaggaaatgaagttactctcctttttttctaaagaagtcgaatgcacacgaaattagtttactgcattctatagtacttgatgtcgtggttaactgcgtcacacacatgccaatgagttgtgtacaactatttgatgcaacaaggattcatcaagccgatactgagaactaattcaatatattttgctcattttagattgacaattctgtcatcactatagttatgtttatatattgacgcgttacaataatatatataacggtatattggaaccaagaaaatatgaagaaatttgaggattattattctgacaaattatttttagcactgttggtaatattggggatcgaattagcacgaattttgctccaaaattccgaaaccagtccgtttagctagctagcttaggtgattggtttcagtatgttagcccctccttcggtagtcaggctcagccttccatcgtcgaccttggaaagagcaggcaaatgacgggagcatgtgctccctggttcctaaaatccacattcggaaaacatacttttgatcaaaattaaccaacattgcaaacataaatagaaacatgaataatattaattacttgggcggcccgtgcaattgcgcgggtagcatcaatttaaaattatctttttttacacatgattttatttaaaattatcatttccgttattctaataattttatattcttaaaagccacatcagtcactaccccttactcatttgtcacctttttatttgcttactcgatttaccacaacttctattcatcctctttaaaattttttaaaaaataggccttatagtttttagagttcattgtcttgttggatttcgtttacaaaatttttagaagtatcgtcaaacatcgccaatttactgctctacggctcgtccgctgccacctctctttattgtcattggaattttaaaaatcaaacataattattgtttgtgttcttttttactttttataagtctcgtcaaatcgttagtggcttcgccactatactgctctacagcccgcccgttgcttcccctccttattattattgagaatttaaaatcaaacatgattattattggggtttattttactctccatatgtcccgtcaaccgtcatgaccatgttgcataacggcatgcccatcatcactgggattttatttggggttttgtttatagtttttagatatcccatcaaccgccaacattctactcctttataggcctaatgcttctctcctctttattgttatttgtcatcgttgtgttctaggtggaatttttttaaaaaaattgcataatttttattcataaattatattcctacttgaactcttgtaattatttttctatttttaaaatttattttatttgttattttaaaatttaattaatctcgtcatgtgttctagattgtctcttatttcaatagtctttatttctgttacaaattttagttatttataaattgtattctagctgagctcttatttttctttttttattattttctgaatttattttattttttattttgaattttaattaatctcatattgtattctatatagaccattcttttaatatttcttatttttttatttccaatttcaattgtttaaaaattgtattcctacttgaactctcttttttatttttttttctaattttggattttatttgattttttattttgaattttaattaatatcgtattggtttcttatatggacttttcttcaatattgtttattttaatttcaaattttagttatttttaaattttattcctacgtgaactcttcttttatttttttttctaatttcggttttaattttatttttattctgaattttaattaatctcgtattgggttcttgtatggactcttctttcaatattccttatttttaattccgaaattcagttatttttaaattgtatttctacttggactttttttttctaatttcggattttattttatttttattttgaattttgattaatttcgtatttggttactatatggactcttctttcaatattgcttatttttaattccgaatttcagctatttttagattgtatttctatttggactcttcttttctttttctccgattaatgtgaaaatttctagccccaacagtgaacgtggtgtcttttttcaaggctattttaataatataatagatataggaatatcagaaccaaagaattaatattatttcatagtattagtttctagacaaactgatttaaaatggacgagacatactctgctggcatgcaagccagcctcggttctgataaaacatgaaaatgaactatgacaatttttctagcattctagctagctatgattgaaacacgaaatgaaacgaattgaaatgataaacgaaatgatactatgaaagactccctccgtccaataaaagatctaatattgaataaaagatctaatattggatgacctagggcaacgaatctagacaagctcgttgtatagtttatgtcccatccaatactagcaaggttgattttttttttgacagaaaggagtatatccttgattcaggatcggtctagaaacgataaatcacttatttgtttttgctactagttgctaccggcgaacgagatgtcgcccacgtttgccataaactcatcctcagccggcgctagcgtggaagcaccatcaaacaatatccctgctgccgtcggggtggccggcatccgcatcccctgtagaccgagacctagaccgaggaaatcgatctccaaggggtgggtcccacactgtagcgcccgttccgtcgtggcgcctagcgggaaaatttaaattctaaaaaccctaattgcgaaatctgtttctttgcttgttgtcagtctccgtgccaatccctgatctcgaatccccgatctatcgtcaaattcaaatcccgaatccaaatccttcccaaatcaaattcctccgcaaaagtctattttgcctccctcaggttcggtgggccgatttcctctcggcccatctctctctctcttcctcacctctcccctcgctctgcccgtgcgccgcgtgcgcgtgcgcatgcgtgtgagccgacgccgagccgagctctccctctctctctcgttctcccgcactctctccccgctccatccccggcaagctccccgcgcgccgttacctcacgcccgtgcgcccgcgcggttgtcgccgtcgtcagccgcctgctgcccgtgcctgcgccgtccggccccgcgccctgccgcgctgcgccgcctgcgccgcgccctgccccgcaagccagcacgcgtgcccgagccgcgccgcccgcatccgtccaaaaaccggaggcagcgcctcccgctcccattcctcttcctccctaaaccggcatagcgcgagccttctttctccccctccgttccccgctttcctctctcggcccggcctctgctctccctccgctcggagctagcaccagggcagaggagcggccgcgccgcgccagcccgtcctccgcgccgtttgaccgcgcccgtgaagcctatcccttcccctcgaagctcccttgccccctagtgccgcccaaggtcggtttccgaaccgacattgccgccctataaacccgagcccctccccaaaccaatcttccccgtttttgccctcgccattgccgcgccctgccctgttcgccgtcgccgttcgtcgtcgcgcgtgtcggaggagccggcacgagtgaggacgcgtgacgtggactccgggcgcaccctctccttcctcttccccggcccgaggccggagcgatcacgccccgcgccatcggccatcgtcactgcgccccttcaccccgcacggtagtgcctcctccccgttctccctcctcgttcctcctcttccccttagctttcagtagaagcttgtatagcctccccgtagcaagctggtgccgccccgaccgctgccgctgctcgttgtgtgctcgccgccgtcgccgcccgtgctccgtagcgcccgcacgtcgccggcctctctcgtagtgtctccgtctaatccgactctagaaacggactccggtggccgcgtagatgctctagtccggaggaatcgaaccgtagttgcgtcgttgtcgtttccctcttttctcgccgccagttaccgccaccgcaatccgccgccgtcgaactccctccggcgaatccgagccgttggctcatctcccctcgtctcgtgcaaccacccggtgtgctcgctttcgcctgtatcgccgtggttcgccccgccgttcacagccgccgtcggccgtccgttccggccggcgccttcttcaaccttccgccggcccgtgtggcagccacgtaggcgccacgtcggcgccaactcggcaagaccgggtcaagccgaccccgatccgccgctcccctctgccccgctcgcgcgcgcggtccaccgcgagccgtgaggctgctcgtgggcccgccgcatccgcacccaccgcgagccgcgcgcgtgtaccgcgccccgctccaaaccctagcgccacgtcgcgtgctcctcgctcacggtgagccgagccgccgacaagcgggtcctactcgagaccacgccagatggacccggcccaccggctccctctctcctcccctcccgcgcgtgccttgggccgccttctcgggccggccggcccattaagctcggccgagccgcccctttctctcgggccgcgccctagccgcccgagggaagtctgtttcccctccctctttcttttctttttcgaaagggtttaattaaatcctttttcctttagaccaaaaatccaataatcttagaaattcaatatcttctcaaccgtatgtccgtttgactccgttcaacttccaaaattcctcaaatctcgagatctatttaatggcacgtttagaggtcaataatagggctttattttcgccgtttgttgagttgtcccgtttcgcgtgtagtttcggagcccgaagacccgtagtgcgaggatttcgaggatcaagctcaagatctcgagcaaggcaagtcacctttgatcatcttgcacctataatttaaatctaagtacttcttttccgcaaatattgcatgaataagtttaacacaagtatttcggccgcggcttgcgagatagcctgccagccccaatcctaattgctgcaattaccctccttgaattattgaacacttgaaccacctttgtcaactgttgtgcttcgatgcatgggcctacaggcacgtgcatcggaacacctcccctcaaatttaaaacatccaacgatgggtaaaacttggggttttacaaaagacttggaaaacccgacacctgggtcggtgcttgcgaactaaaatgaatttccaaaatcgcagaccaggggacgtaccgggagtacggtttcccgctcttgcacttaaggaccgtttccttagaatttcatccgaacataaagcaagtgcgaccacatgggtggaatgggacacccctggctgagtaactagctaatcgggggaaccatgatgccaagagacatgtggattcaacagggtggtgccggggagaacccccgggcttcctggcacagtatggtctgggacctaacctgatgtcggtctgggacccctctcgttagcatatggtgaacctgtgtcggctttcgaaatgccttgtcatgaaagcctcaaggtctctagacgtggccgttctgcacgggctgggtgatccgggttagtaatgtcttgtgggtaaagtgtaccccctctgcagaggttattaaactgttcgaacagccgtgcccatggtcatgggcgaatgtgaggtgattcctagcatagtttgactactgcttgtgaaattactgttgtggaatgggttcgatgtttggaaaatctacggctgatgggatcagccaggcccgggtggccgtttgaaagccgttggccgggtgccaaccttgaatcaattcaaagattgatacattgcacatactccgaccggacgagacgcactgtctcatccgtgtcgtttgagaagcactcacttagttgtttcaaaaaggagtttaaataaaaccaattgcaaaaacaacagcctttcctttgaagcctgcattaaacacttaattcccatggcttgctgagtactcctgtactcacccttgctctatataaataatccccccagttgctaaagaagatgatgtggatcctgctgatgaggagttcttccaggagcaagttggctacgatgagttttagggtttcgacctagttcccaagtcgcgcctgtgatgaatggtccaagtcttggcttccgctttcccttttgtaatgcagttgtgagctcgggatctgtccgcagcccaacatgactgtactcctactctgtaataaagagacctctgttgctgtgatattctgtcttcctgtgataccagcactgtttcctgggactggtatcgattaacaggttaatttggagcgtcacgggctagttccgttcggggctagttcggggcgtgacacacactaatggtgggcagcccagaaagtgaggttgggggacatggtcaccatcattccctgccaccgtcggttgggacaaatcctcctccgccccttcctactgttgcggaacaccgacaagcggaggatggcgatgcatgccgggggcgcaagcccaccataaactcttgatggtatttcttaggatttgtcatattatcaatgataagtggttagtacataattgcaacgtttggtatcacatttatgtacatttcacaggtattaattaacgtgtatcacatttatatgtctcctcataagtggatcaaacatagatcaaataaaaagacaaattattcgaacaagttcgaaattccaactagaaactattagcccgttcaattcaataatagctaggcaagctgcaaaattattcaagggatcaaccgatacatgtaacatgtttgctagctgaaacatgagaattaaagccagcttcggctcggtaattctgatacaatacaacaccaaaaaactacaacgaaatcaaaactgagctatccacgattggaacaggaaaagtatagctaaacttaaacgaaatcagacacatgtccctttttattcaagatttaggtctagaaactgaaatggcttgttgctagctagttgctcccggcaaacgagccgttgtcgatgtctacctccacctcccctacggactcctcgccattagccgccgcgggcgcaggcacatgcacaagctcttcggcgcggaagcaccaccattgtcagacaatatccccgtcgttgccggagtggccagcattcctagcccatcccttggagaccaagatcgaggaaatcgatctccatggggtgggtcccatgcaagcggtgggcagcccagaaagcgagattaggggatagagacaatggagtgctcctaggcctgccatctttgatccattgcttttgaaacacgtggcctagatccgtcgctcccaaggcccaccaccaccgggatccatagctctcggtcccattgccgtcaatatgcgctccaagaaccatggtcgttggatccactactcctaggcccgccattgtcgatccacctctcttggatggcacagaggaaggtatcgaggaagattgtggcgtggagggttgtggagggcaatgtggaggaaggcggcaaggacaggtgttgtggcatcatatggaaactgagagaagagaggcgtgagatgacagaaagcaaggactagcctcacgcttggtttttgtcgatgcctttttaatatggttttatgattttcataggcatttctggtaccagggttgcctatgaaaataacttaatttcacacacaatcctcttacgtgaacgcttgcgaaaaacaattttcgcagcgggtttagaccacaggacctcctcaccattattacaagtggattttcaacggcctacatgtaaaaataaaatttggctctctgcaaaaaatcatttttttttagtagtgtgagcatgtagaaatcagtcacgcaacgatcagaatatcattggattgatcagtgaagttcatccctaatatgagttcatagagagacaacttgagatacatccattatatcagggatcagcaagtaggataaaactttcacatgacactcctcaatgtgttagctatatatactccctccgtcccaaaatagaagggattttgggtggatgtgatatattctagtacaatgaaccagattcattgtactaggatatgtcacatacattcacccaaaatctcttatattttaggacggagggagtcattctttatctttaaataataatttaataatataaataataaaataatatggaatttaaattaaattatatatttaaatttaacttaaagatactatgtatgatcaaatccattaaattctacataagattaagttcaaaaagtttaggaaaagttcaaaaaaaaggacttttggaataaaattttgttcagaaaataataatttagaaaatgtgtagaaaaatatcgtaaagaggtgaaggttgtcaaacttgcaaatgaaaggctttcattcatgcctaatctacaaaattaaaacatctcggttttatttcaaagtctctagtagaagcaagatacacatgaagtaaactgtgggtcctatgacggcggagtttgatagccaagcgttcacgtggctttttcccgcccgtcgctcccatgcaaaaccaagtatgcatctagatcatgcagatgtcccaccacacatcacatgattacggctccctataattagtgccaaatgtagttaatgaacttttacatgcaaacacaatcaaaattttcatgataaacttttgtatagcaaaaatttagaaactttttatatatagtttctatgtataaatttatgtgtataaaaactttcatgtatacactttagtacataaatcgattaatacactttaatttatgtatagactttcggtgtataaacttatatgaacaaaagagagtatgaggacgcggttgcctaaaacaggctatcggggtgcattcatgagggcacaccgcccgcactcgttagccctttcaatcaacttatgatgcctcctctagcacaatcaggctataacctagcatggttgcatcaacaacaataatccattatatttcatagcatattaattagactcattattacgataccatcaaagactgaaaaaaaatctgggttaacgttgctcgtaactgaatctattttgtgaatataattgaactaagggatagattgaagttggtgatcttcatttaatagcgatatagtagagaactctcctatctttgacggatagttaatacctaaaagatatccgcggaaggaaacaaacatgcaagcaaaagtaattaattgatcttttaagacaaatttacttgttgatagaggctcacaatttttaaactgtactttgccctttctaatcaactcaaaatcgagacaattgtccggcacattttaatatcaagataaaccttttcaaacctccttttatttaaccctttttagagaacacttcagattatcatacataacaattgcaagatatatatggacatttgtagtataattgatggaataagaattagacatgatatccttctagttgcagtattgcattacacaatgttcaaacaactcttcagggacatggtgaaaccagagcatccaatgtattttctgttgacgaaactatgaaagtgactttcatgtgccatattgggtccagttaataaccttaagataatatacattagctttcttttaacctttttcttcaaggagtacttctgatctctggcattctcagcattttaatttatttgtttagagttgctctagttatactatatatgtaatgggtgctagctaggttgatatatcatattaacagttttccagggacgattaattatatcgacaaagcttacaatctgtagctatatagccttgaaattttggttatctaggaagatgtggcgcatggccaaaattactgtgaaaaatcgccacatgtgatttgggtcttgatttatcacaatgaattgaagagtgagctggaccgcatggcaccagttctttaaagtcccttctttggatttgggggtggcaactctatagtctacactataccttttttttctttttagaagcacaactatatatacactatactggacttgctttcaggccggacacaatatcgccatgctcaaattgtgtctatgtgtgtttatatcttctttttttttctactccctccgtttcaggttataacatgttttgactttggtcaaagtcaaactactttaagtttgactaattttgtaaaaaaagatattaatatttttaacccaagataaatatattatgaaaatttatttaattatagatttaatgaaactatgctagtgttgtaaatattactactttttcctatagaattagttaaacttaaagtagtttgactttgaccaaagtcaaaacgtcttataattaacatgaaacggtgagagtagtacttcttgcattcttgcataatgctatctatttcaaatgaaatgggcagttttcatgacttgtttttctttttgaaaaaaatatatgacagaaactcgggctccttcctgcatgccattatatttgttgtcttaggaaacttcgactatatatactgaaatgagttcaatttatcatatgcggtatcatatgaacactcgaactgacaagtaattaaaatgcatttttagcccatgaacttgtttaagcagctagctagtttttcttttgtttatttgttgtaacttccaaagagagagcaccagacccaaggtgcagtactgagcaattataatgaactctgcaatacaattttgcttatagatgtgtatactcgtactatatatatatatatagtgatgtaccaaaatatcgactgctaaaactttttatttgtttttcctagatctaattaataaattaaaacggctgtacaagtgctttgatcaccatgttttacagagaagaattatgtggaatggactttaatcaatgctgatctgaagaattaatcagaagaatgccttctcttttttacgagaattacatacagaaaaataatatttttttaattaaacaaggaagaaattcattcatctgaatttaactcaaagtcgatgatacaaatagatatatctgtcaaaaagacagggttgaaattaattaaaaaaacacacgcttcaattttctagtgctatattatagcaactaaatgccccttgatgagatcggagagctaatctgaaattcatccatatctcacagcttgcaaataaaggaacactaggtcaaaatatcaagttcggatgactccgaatccgatacgtgtaagcagcacacaaagccgatgcaataggctcagatggtggtggggcaatagatggtgtggcgcgaaaaagtctatcccaggatagctacctcccctgcggtactcctcctagaaagaaaggttgggaggaagttggaaaaataagtcttgaactattagagcaagttcaatagtatagtccactactagctccaattcaactatagccaatttaatagccaattgataccatagttgcttactatactattaatatatggtcccacatgtcatacgcacactgcgtcttgaaagccatgctgcagctgactacagatctgtagcctgctgctattctttctcatcttttatctcattaaaatatgtttatagctgactaatagtctgctattatacctgctcttagcattagcaccggtgcttgtgtggtgtcactggcaggggtgcttgtggcaccactctgttacccaaattgggactcgctgcgggaggccgaccctctcacgcctagaagtccccacgtactgcatgaacggcatcgtcaactctgcagtctcattcgggtgaattatgtatatgtggttcctaagattttggcacgagagccagatcacgggctagggcacaccgtgcagtgatacagccttcctgtaggtaccagagcacgcaatagccgaaaacgtgatgctccattgcctgaagaagccatggtggtggacttcgcgagagttagcgtggctttgtgctgactttggaagatcgatcgactgcttagagagtactatgtatattgtgtagatatttggtgttgtgcatctgggccctttgaatagattaaattgggtgcgaataacttcttaaaaagtgcaaattttatctctattattataccttaagagatatatcacaagcaactattacacatcatagctgactattggatgcaaatgaagcagcaattaagagcagataaactgattgctaaagttagctacattggtcatatcttcgcgcggttagagattaaaaaaacacctgaaacatatatgctaatcccaatctaaattgctctgcatcggtacgtacagataatatatcatcgagcaccaagctagcctccatggatgcatgtatcacactccatccatccaattcttttgttggttagtttaaagttgaactagccaatatcaaacgttataggaaatggggtagctatagtatatctatcacagaatatattaatatatgtgcatacagttacacgttataaatttatgtgtgtatatatcaacgcgatagtacatattttttaatgatggaaataatttatattctcagtccctattatcacatagctaataggttttctactgaatagaaaagaaaaattaagtgcaatggggaaaaaccccccaggtacccaaacaaaaaaaaaaggactagctaaaaggttaaaaggcggaccacattattctaacaaagtaagccctataaatactaggcttatccatacagttgaataagtactatccttattgtctacaaaatacaagaatataacatcaatgtgcataatatcctatgaaagaatcactaaattggaacacctcattattgaaacccgcccatcactgtcagattctctagaacgaacactaataatactatgaacagcgggatatataggaaatgagtatcactgggcagtcttgaatgtcgaaactacagtgatactcaaataacaactatctttagaaaaaaataacttttccatataaagggcaacattttagaaaaaaaaattcatatgaaggcagatgaagataaaaattcatataaacgttgtagcgctctactccctccgtcccaaaataaactatgaggttgatttatttaggacggagggactatgatatctataactttgtaggagactattttttcatttgagatcatttatctagctaaatatgtgtaaaaagttctcatgtctatttggacaaaatgattttttgaatttgtaaaaacttcagatttagacaaactttgtatcaaagttgtagagctcgacaagatatacaactttgtagtaaaaaaactatttaattcgaagtaatctaaaagagatttactccggtcgaacaaaaagtatctcgagatatcggtacctcacggtattaaattgttccgatcattagatctagctaggcaggatggacattgttaaatccaacgattggaaacgatttgatactgtaaggtaccgatacctcgaggtattttttgttggaccggagcaaatctcaatctaaaatgtcaagtacgaatattacttttttggactaaaagagttcaaagaataacctatgctattcaggcacgaagtgccctataggtgagatgctatataccacacaccttcatattttgtgcgaaaaatcactgatttccaacgcacgctaacagggttttctgctatagtgtatcatatatcaaatagaagcgtcagttgtaacttgcatagagttaactaacttttgttttcaaaaaaaattatttctataatgccaaatatattagacactcccgtcatccggttactaaatatatttttggcattttaaggtgagagtattgaaaggaaaaaacacatcatgcaccgggcgaagagagcaacatgacattcaaagaggtgccggtgtctctttcctattgcaaaagcaaacattattgcttatcacctcctatatattacattttgcgatcctatatatccattgtcagcttccattatctaaaaaaaataaatccattcttagctaggatgcgtgcggcagtatatatgcagggcaaatgtattgcttaatcgatcgtatacattatggaagataagaacaaagaacacatctgcactcgttagagggatcaaaaacaaaatccagcaactagctcgtttatttaattttctgtgtacaaaactttttcgatcggttcagttttcttatgcatatattatatatatgttatagcttggtcgaagagattctttcaacatccatttcttcaccccaattctttgttaaagactgttggaacagtcctgctaactcctaacagaccggcaactaacaagggcttgctgacaaaaaatcaattagttaccctttgataaggagtatatatttcaagtattggagccaattctgcatctgattcatatacagcgagtactgttccatagaacactctgtgtgtgtgtgtgtgtgtgtgtacggttaattagaacactgcatgttaaagttgtttcatcgcctgagacaatcaaatcctcaggtaatatatgggaccatgttggggtatgctttgaaagtatttttttttaaaaaagaaaaaagatgtagtgccaagcttggaaggatgaaaccgaaggaaatcaaagtctcaagcagtaatgttcaagtgcaagtatattatatgcacaggaattcaaagctgaactacatatatacattaattttctagttttctactaataattttcttaatgaaaccacagcctttagtacccttgatcatgcagctatcgttcatagaggtaaaacaacataccatttcacatcttattgtcgatggcccttaattttgagctgatcaccataatctgcagtacaagtaggttagcacaatagttgacagtctcatttgatgcagtgtacgagacaaagtttctctctccctctctctctctctctctctctctctctctctctctctctaaagtaaaactggatgcacagtaagttattcttgcaactttactgcatatggtactagctaattcgtgttgtgcatcatataggtagaggatatatatgcaatagagtagtttatgagctcgctaatttagctagaaggactacgcatagtgttgtttggagggtccaagtccatgaacttatccttcgggattgtaagttatctactccctccatttctaaatatttgacactgttgatttttaagcacatgtttgaccgttcgttttattcaaaaacttttgtgaaatatataaaactatatgcatacataaaagtatatttaacaattaatcaaatgataggaaaaaattaataattacttaaattttttgaataagacgaacggttaaatatattttaaaaagtcaacggcgtcaaatatttagaaaaggagggtttatttcactaatatattgcaccatttcctcgcagaaaaaaaaatcatgttgtgcttagatatgtgcctgtgcctcaacgcccatgaactgtagctatcaagggttcatcaggctaggactgaaatttttgaaattttggaattcaattacaaatgaataattattcgaacaagttcgaaattccaactagaaattatttttatgtattgtatttgctcattttagatcgacaaggttatgtcaccattgtagtcatgtttatatattgacacgtagatctaatggtaggaagaaatcaagaaaaaaaaaagggaggaaatattttggtcagtgggtaaacttttctgaatgatatatggatatctgaaccaatttttttattgaatcagcttctagaccaaattatttcaagggatacatgcaacaagaagaattaaagctcggttctgatacaatacaacaccaaaaaaactaacgaaatcgaaactgagctagccaccattgaaacgggaaaagtatactagctaattaaacttaaacgaaatcagagtatcagacacatgcatgtccctttttattcaagctttagctctagaaactgaaatggcgctttgttttgctactggctcgctagttgctcccggcgaacgagccgccgtcgacgtcttcctccgcctgatcccccaccgactcctccccgtcgtcatcagccgccgcgagcacaaccgccggcgcaggcacaggcgcattcgcggaagcagcgacgtcgccagacgatatccccgccgccgccgccgccgccgccggcggagcgcccggcaaatccagcatccccgccccctgctggacaccgagaccgagaccgaggaaatcgatctccgcggggtgggtcccacgcaggcggtgcgcagcccagaacgcgtggttgggggacagcgccgccaccatcatgccacggcggcgccgccgccgccggtcgcggcggatcctcctccgcgcctccctgctgtcgcggaacgccgccgcgcggagcacggcgaggcgcgcccgcggcgccagcccgccgcgcaccatgcccctgacggccgcgcggtagtgcctcctcaggtgggagcggaagcggccccgctgcggcccttccgggcagtaggggcagcagaacctgcgctccggcgccggcggcggcggcgcgagcgcccagaacggcgggtggtcgttggacgaccagacgctgtcaacggtgctccccatcgcgcgagcgagtgtgacggcggcgaggtggtgagcttgagctggtgagggtgcatgaagacattcccgttttatatctaggtcaccgcgcttaaacgggaaagagggtgaatgtatcagcgagacggcgcataaatgctcctgatctcttccatttcaaggtgcacggtcgaacattgatagctgctcagcctgcagtcgaacattgcgtgcatctgacacgcacggccggcgtgggtgacggcggcttcgcagcggcgggcggcgcgcgacacatgcagcttcgacttcggggtcgcagcgcgtctaacgacaagtcaatgcatggcaacgggagtaccggagtagagactgccatgcgacaaacaaaactaacagtacgtacgtatgccatgcgactatgcgagacatggtctgatcgattgatatgagatttaccgttgcatggctcatccactagcttccgatagttggccagaagatatacaaacgctacgatttgggcttagattggttactctggtaggagaggaccgagcgtagcattgagcgtgtatggctcgctcgctggtctacgataacgcgagcaacaggcggtcaattcgatcccaggatcgtgtcatccggccgccggccccctcacttcctcaaaaggagtaaggagtttacatggagtatttttgtctaattaacggtattttttcagattttcgaattagttactttttaagtttctttaaaaaatcaaataaatcaatttttaagtttgtaatggctaatattcaattaatcatgtactaatgtgtatcctcattttgtataccatggaaaagctgagccgatcctcttccaacgaagcctaagacttgttcggttaatcccgaagagagagattgaggggaggataacaccacagcataacagatgtgaaatttgaggacttttacggtagaatatactagtagtatatatgggggtgaaaatgggtcgggttgggtcggatcccacccttcccatatgctaacacatattttacaatcggaatcaggtcagacacggatagtgccaaatacatatacaaactcggatattgtcgggcaaaaatacgaaacgaatacgtaccaaaatggatacgtacactatcggttacaaatacttattcggatatcaagtctaagcaacaatcatatatatcacatagacaataaccattcagcaattccatatatccataatacgattatatatgaccttaggaaataaatagggtgcaacacctcgcaattgaaaattatttcatatatgacatacatttaagaatattaggtcgttaaacacgatatatctcacagttgagtcacaatgccaatatatcaccccatacaagctatcggtaggcatcattcataggaccacagaggcatagactaatagatatcatttaaattatcaccaatagactaataggtactacgttcccgaacctgatctcatatccgccaaaaaagacctgtattcgacccgatatctatgaaaagtcccagatacccgaatttgtcctgaagtaatatcgtcgggccgagcgggcggaaaatacctgccccattttcacccctaagtatatattgatagtataaataaataagattgcgttgggactctctcacaaaatagaaaatgatctttagttatttcatgttagatcttaactccgattgtaatccaaatattgtttgtgcgtcagattggattattgacctgctacgtttgaatagatggcacaactaaatcctcctgatcggatttatggattcatgaaacacataaaaacattaatccgtactggatagctagagtgggagaaagtatctaacataaagaaagaccattttaacccccccccccccccaaaaaaaaaaaattaattttcactgcagtcaatttaagtcgtgggtaggcaaatcaatgtacgcccttgattgtttataccagtagtatatggagtactaccaatatattgtaccgtaaaagttctctaaaatttatcctgtccatatccccttcaatcctcttaaggggagaataaccttaaaagacctaaagaatttgatttggtttgttaatatttgagaaatttttgaattgcattagacgaaactgagtaatacggtttcgattagtgtgtcaatttgtaaacttcttctccacgagactgtaaatgtaagcaacactatcattgggtaattctagcaccagtgatcgatcgagacaaccatgctacgttcggtcctctcctaccagagtaaccaatctaatcccaatcccagcgttgtatatcttcggctcgcctagtcacatggcacacgcgctgttagatttgtttgcccgatccccttcttcctctagctagctagtctactcccattgccatgaacatgtcgttagacacactgcgaccacgcagtcgaagctgtgtcgcacgccggccgccgctgcgaagccgtcatccacgccggccgtgcgtgacaaaagcacgtaatgttcgacatgctgcaacagctagcaatgcttattaccaggtgcactatgaatggaagatcaggaatacttgcattaatgcgtcgtcatcgaaacatttaccttcttccgcgctggcgccggctgatgacggggtggattcggaggcggaggcagacatcaacgatcgcttgtccgccgagagcaactagatcaccttgttgtcccaatatagtacactccccgcaacgaaaaaaaaaaaagtggttagtacacaatcaccatacatattagttaacgggtctccacataaatgatacatatagtgtgtgtatatataaaaggagacaagtggacaaataaattgacatgcagcaaacaaaagataaacataatgaaagtggaagtcaaaagattaaagatctagcattatgccacatccagcatataagtcataggcaacaaaagtagttgctacacaattatatctaatgtgtcttcacattaatgggacgggacggggtagggtgattctagttttgtggttgtttggttggagcgatacacggatgtgtcccattagatcggagaccagctcgtccccctaaatcaagcagcaattcatccctcttacatctctctcacgtgcattcttcctccttacggcacacagcacaaggcttgtgggaggaactagcatcgtggcaaaacctgatgagcagtggccggtgtttgcaccagtttgtgggaggagacatgcgacgttgtgcagcaaagctcgtggcagcctctcgttaatataactagctcttacataaatatgtgagggacattttctattgtcttgttttctaacttttttgcgtgttgcattgaagctaacttccatgttaacattcaatcgaccttgtttattttgtgtttaaaaaccaaaactagcttgcatactaccatacaagggctgagttactcactgtgaagggtgggttggctagcccagctacaacccattcactgcacgccactagaaccctgtcctagtactaggctacccacattagtcatcactcaccagcccataagcaactccaggccagtgattagatatggggcaatcgaccgttgtttctcttccaatcttgtgactacatgccccttcgtcatgacccataactgatcatctttattacttatcgctcaacgctcgtaccctttgccgcgctggtgactatgccagcaccagtctgcatgtgttggcattgtgccatttgtggttccacggtgcacggtcgtgcttccaccactatgcgctataacctctagccagcaactggctagagctaggtgactccataactatattctattatttatcttggatattctcttgtgccttcatttattggttgtactttattttttatacgattacattatgtgttatgttcggttattttttttattgagcatgtgcaatccatcgaaatgtgaccgccgctgctactatgtataacattgctcctttatccattctcaaatataaaaactttgcttgtcttaaccaaattatattcatattttgcttgatttgatcgagactaattatattttcagctcctgctgttagatttaattgggtaattaatccatttaaatcaattaaatcaaataaattccaaggctcattatgctaggaattcatgtgaattcattcttctatgggatatcaatgggatgaagagttttgagaattaatccatttgattaaggaattggtaacttatatcaattagtcctaattgatggatggttgatggttgtgtagtggaggatggttcatggctagttgatgacaattagttgctctattcctcttcctattccattggtaacttacatcaattactcttaattgattgttggttgatggttgtgtagtggaggatggttcatggctagttgatgacaattagttgctccattcctcttcctattccatgactcttactcttcatcttccattcctcttataaaatgggaatggatttgatctcccgcgagaaaaagaagacacactttcatccattttccaaagctgttgttgctacggtaatcccatcccgacgagtgtgtgcacacgcgttgggagagtaggcctccgaaaccacgcgttgctgcgacgtttgcacagacgggcgggcgatcaggtttttggggagcgcaaggcgcgactactcactgttcgtcaacatctacttcatcttcaccaacatgtcgaacactggagacaaggagaaggagactcccgtcaacaccaacggaggcaatactgcctcaaactccagcggaggaccattcttggggtataaccttattacattatttcaattagaagttttactgttaatgttcatcgcaatgtcaacattgtgtcattatgtgattgttgatgcttattcaacgttaagcatgctcatgttgattacattcaccactatcactggatcaaatcctattgtaaatatcatgtttattatcttgttattttggattaaaatatgccgaattatgaccaaatttccaacacctgcttcttttttcttcggctcaccgactcaccaccctcaccccttgcctccaaaacactggattgctgcccacccttgaaccgtatgaagtgatgaagatcagctaaagtagtttccttcaaggtttaccaaaccgtttaggatagagttaccaccaacccactgttatatagtttggggttacggccaccccacggtttgacagttaccatgaggtataccttggtttcaaaaactaaaaccacacatggtaatcgcgtgataaccacacagttttgtaagccctagtttcctctcaattggtgtattaatagcgattgcattgagatacactgtgctaagtgtagctataatatgaaaatcaatctcaactcatatgaaaacttgtgtacagtattgttttaaaaaaagttcaactagatgaaaaaaaaatatatcacatgtaggagagatgatgatggacaagcgtgtaaaaaatctatccaaattcaactacatttatgagatataaacaaggaataagttcactttaggtccctctatttgttgggcagtctgattttcgtcccttcaccacaaaaccgggtacaacccgtcccccaacttacgaaaaccgggcaaacaaggtcccttgatcggagtatggagggcggttttggccgacgtggcgcatacgtagctcctttgactaggtcttcattccacgtggtattgacatggcaattttatctcgaaaaaataataaaaatagtgggacccatatgtcagctacacaaaaaataatttaaaaaggtgaggcccacatggtcccacatgtcagcgtccctcttctctctatccccctctctctccccctacactgccaggagagaagggcgagcggcggcaccgagggggtgacgggtggagcagcgatggagcggcccggcgacgggcgatggacgtcggagcgacggcgggcggcgggcgatggacggagcgacggtgggcgacgggaggaagcggagcagcggcggggcgaaatggagcggcagcgggccgtgggtggagcaacaagggtgcagcagcagcgcgatagcgggcggcggacagtgggcgaagcgatgccgacgacgccgcactcaccgccacccaagctgagctcgtcggctcccctcccctctccctctccactctgggctcttcctcttcttcctctcggctctccgtacaccatgccccaagcttgcttaccgcatatctgtcagcaaagggcctttttcctgccaaactttttgtcaggaaaacttttgccgacagagcgggtctgtcaggccaaatgctgccggcaaaagtattttccgacagataaatctattttgacagatgggttgacagtggtttttgttctttaccgacagacaatatttcccgacagatgaacttttgccgacatatggacttctgctgacagatagtttgataggaatatttacctttgctagcagataatatgacacctagactttacaacgcaaaataataataataataaccgagctagcttattgcagcaaccaatactgtgacatgcatggagccctcgcacacattttagtagattacataattcaacatacaataacatcagagtgcactagcgcattttaaatgacaaaagatgagtcataatggtatgcaaggaaaaagatgctaaaatcgctattttatccgggcttacatgtcgtatatagattacatacacataatagtagaaaatatcctaaaaagcatcgaaatggagaacacgggtacacgcttcacccttgtcaaaagttcacatgatacatcacctgtaatgtaaataaagtgtattgctcagatatacaagtcagatatataaggtatagctgagataagaaaaggagaagctctttcgataagaggcaagcataaaatcgatgcaaaaaggaattgcttgtatggaatataactatatagttcaaacaaattcgattccctactggtcaaacagaaatgcattagtatcgagcactacaagctcaatgagtactacaaatactgaagactaacttagcttccatgtgacagggggatttcacttgtagttaaagttgtagttacaaggcaaaaacttgcaatagttcccaatgctcacattctaaatcttgcactatccatttaataaaaaatgccttgtacatagaagaaatagctatacaaatcatatgctcaaacagatgctaacaaatcttacaataagaaaggggcatgtctcctgtacaaaaatgcaaaaggcatcccaaaataaatgtttcttgacaatcaaaaaatacctctctgtacctcacaatgaccataaaagtcttgccaatcaaataagtgtgtcattactcatgatcaataccttttttaggggttaggacggtactatttggtgatagacaggagtgtgttattctttcggtcgaagaataatgttatatgctcataggtttatgccaattcataaccaataaccagcagcatcttccttctagatttgtactttagagtttagacaaaataaaagtagtactaatgagaccacctttatttcatctcttccattttaccttacagctacttggattttatctcgagggcttgagtttttaatctctgaaccagaataaagtaacacacatataagcttatagcttatactccatatatgcaatttatgtaagataagatgagtagccatcttatgtaaaatgagcatatctgatcagcaaaagataagaaaaatcaactaaaatgccacagaatgtttactcagtgaacaggaatatataaacagataaaagttctattataagttttataaaattttataaattttataaactcaaacgaacatcatcacctaattaaaactaggtggaagcacaagggtaagtatgatcagaatgagccttcccagaagctgcagacaacggcgaccgaccacaacatcatccactccccgactcctcgggccgtcaacaatgaagtatgcaaaatctgtctgacaatctgagccaacaatatattacctccagagacaagaaaaaaagcagaaacaaacaccatgattttcttctatagtgcatgaccaaattatttttttaagagacgccagcagctccatttaaaccatgagtaacatggccaaaatcatacaaagaattgctggtgatgtctcattaattttcaagacaagtagataaggagaatgggtaaagtacagggaataacccagggctcaatctggacatgtacattagtttctgacttatgtttagatattttcagacttcctacaaatttagaaataaatttcattgttcagtgccatatagcaataatatgcaatcaagaaaaatctaaaatttatgcaaagcaaacctgaagacaatatttttttatcaagagggcagaatcatatttggaggagtgataaccatggtgcagaaattttactaggaagcaattggagaatgcactcatactaatctgtgcattgtcccattctcaaaagagaaaaaaaaatcacttgagcagttatttgtactacattgagttgagctacatcaaaactcacttatttcattcctaactcctgttgataaagaaacaaccacgctaaagtataactgagctatgaccttactttacaaatcacatcatttagaatattcaaaaggaataaatatataagtagaaatcactgatcaatctcagggaaaaaaaatcatgagattaacttattcggtagtaccactgagaaatataaattatttagtcgtagcactgaaaaacaggcaaagtctaggtgtcccttccagcaaagtgcatgggttcgtttctgtatattgagaaaaattactactactcgatgagttcctttaataataagctactaacatgcatcaacagtttagcttgccctggcaaggtataataaacatagcaatgacacttcagctttgcccgactcatcacatctggacataacaacattgcaggctcactggagaatactaatgcacacaacaattaacacctaacaaacttaattaatcggacacaggagacaggagtagcaccgtaccttcacgaacaaatcaagcatcatatctgagagggatttgcaggactaatcatcagatctggaaggtatttgcagccataagaggaggggcgagcaggggacgcgttgttggccggtgctgctcacccgtcgtcgctgcgacgaggcactgcggaggcagtcggcgcttgggcaaggaaggggcagcaggcgccagaggagaagggaaacagggtacggtcgccctcacccgagacctgacgcagggacgagccggcgaggagggggcggcgaggagggaaggggtagcgcctggagtgggaggcgccgccggctcatcttgaggccggatttggcaccgccgaagctggggactgccggatctgtagcaccagcggcggcggcggctgcggcggcggatgttggctatgcggcggtggtggcggcggaggatctcggtgacgcacttgtggaggggagacggcgaacttcgtgggctatcgccgaaaaaaaaaagagcagtggcggctggggtagggaagtggggaaaagagaaggggatttagggtttagttgtggcttaattatagagagcagctacaaaacggaatcttgttgtaacgggatagtttaagtggctcctccccgctttcacgtgcactccatcttgatacctggtaccttgggtatcagttggtacctggtacttggaacttttggtaccgactgatacctttggtacctgatacctgatatcggctgcctttggtaccgactgatatctttggtacctaatacctggtaccggctgccggctggtacatgttatctagtaccgtgatacctagtacctgatacctggtagcctggaggagaaggaggagagagagagggagaaaggagaaggcagccgcgtggtggagcaggacgaggaggcggtggcgaatccggtggtcggcgaggcggagtgtggaggaggaggcagctgtgaatccgatggtcgtcgaggtggggcagcctatgagaagaccaacgagggcggggagccagagcagcgcggtaagggaggggagcttgagggcgacccttgccgaggccgcgccgtcgtcgtcctcctcggcggctagggtcctgagccgacaggagaagctcccacccaacaacgccttccccggcgccagcggcggcctccacgtcccgctcctactctccctcttgttcaccgcacccatcgccgagctcctcgtcgtcgcctcgacccctgcagtggtggagcgacggcaacagggacaacggcgggcaccggctccgacgagcgtcctccacgcccaacgcgccaccccacatagctagccaccatcgtcgtcttcgtgctggtagtcacagagagataagggagaaggaaggggaagagacaaagaagaggataaggatgctagatatttagtggtagtagttgtcacgttgcaacggaagcccggggtgtaggttttctgttaattataacctatatttttttgctgacacatatttggttagtactactataaataccgacagatactttgacctcaaaatatatggaattactgacacattttatgtctcgtcaggcagtattgccgacaaatagtgtgtcataacctttagcgacagatagattctcggtgattttggtgacagatgtctgttggtaatttagtgtcatggtgtagtgtccgtcctcgcggcggaacggtggcggcggcaggccgcgggcagagcaaaggggcgggcagagcggcggccacctcgccaaggacatcgagcgcacctctgacgcgagaggagcggcggcgcgcaccagcctacgggagggagggagaggagcggcggtgcgcttgggtcggcggccggcgggagggagagagaggagcgacggcgcgcggggactggcggggggagcggcgcgcggctgccggagggagagggtcggcggcgcacatgagtcgacgggtgggagggagaggagcagcggcgtgcgccgcgccggtggagagggcagccaacaggagggtggaagaggagcagcggttcaccggcctctgcgcccttgtcactccgcccaccgcctgctgccgctccattttaccccgctgacgctcaactccgcttcctcccgccgcccaccattgctccgtccaccgccggccgctgcgccacttcgctccatcgccgctccgctcatcgtcccctcggctccgccgctcgcccttctttcctggcagtgtagggggagagagatgggggatagagagaagagggaggctgacatgtgggaccacatgggccccacctttttttaatttaatttttatgtagctgacatataggtcccacgatttttattatttttcgggataaaattgccacgtaaacgccacgtcattgccacatgggacgaagacctagtcaaaggagccacataggcaccacgtcggccaaaaccaccctccataatgccaagggacctcgtttgccaggtttcggaagttgggagaccggtcgtacccggttttgtggtaaagggacgaaaatcggactgaccgacaaatagagagacctaaagtgaacttatttctataaacaatgacgagtttcgaattccagcccatcgtcacgattacgccgcagcctgcaagcccatcgttacctagccagaactacagcccacttgcagtattggtccatgcccctttgcatgcaaggtggtccttctgggctcacggtccgtgtacttcaggtttcggcccaccataaccgtgcacgtttccggcttccccttcttgacgctggcaaaggaaagtatgggacctttgaattggaggaaaaatatagaaattttggaggattttaattctatagaaaaatttccattgaaaccctttgaaattcctatgaaatggacaatcctatatagattttggagaaaatttagcaagagcttcaacctcttggtaactttcctttgagtctatctctctcatctaattcctgcgtttttccttcggttcaatcaaacggtcattcctatattttttctgtgttttgcaatcttttgttttgcacttacattctgtcgacgtttgatgtcgcgattccggtatttgcatggtatggggatcgttggtactagggtatacgcaagactgaggtaaaagatatggagacagggatttttatacaggttcgggcccctgaattgtcaggtaataaccctacatcatgttggccgaagccgatattgctcttattcaccataatcacaccagtacaatatttggggtagcctatctaactgttgtcgacatggcggtctgaagttatgactcgtaatcgacaacagggtagtcttcctcctcgagttcgtgcccggtgagatcagagatagcgctttcatatctcctgacagtatccgaagacaccgtaggggactagccgtgcctatctttgaagtcgatatccggcgtcttgtcttggcgtatgttggcttctatattaatcttctgtcttgatctattgttccgtctatgttgactgtggtgggtgtgttgatcgtcccctctccttctagggggcattgtatttatacttataggtgtccccttgtccaagtagaactagggaaaccaatatggatacaatccgagtagtccttgtcgttttcatgtagaactctggttgtcttcccttatccagaactcctcctatatccgtaggtcgtttccgtataagatatggtatgtggtgggtcctaacgagatttagtcgactactattaggtatacgtggtattcataaccctgacacattcctattaaaatcttacgtttttttctatttctacattttctcaatcctacgatttaaatgaccctacaggttttgccaactttgcagctttgctatcgaatcgagataccgatggcgcatggatgcaatcgtgacacgcaatacgtgctaattcatggcgctttctcctgcaagctcgcatcgtaccttgcgtcgttggcacgtacagggaacgcgtgcattgtcgaataagacattatctatgtagatagacgtctatttagatttatagaattagaaaactatattcatttgtgttagttgggaaccttcttctctttaaaaaatggagcagcttattaacacatgattaattaaatattagctaaaactaacataaaaaatagattaatatgtctttcttaaaacaacattcggtatagcctgaaaaggagcgatctattgcacagtgtcagcgagagcgaaggatatgctcatactccctccgattctatattaattgacattttgaacaaagttaaagtcaaacttttataactttgaccatcaataactttaaaaatatttagtttaaaggaactagaacaacatatatagatttgtcttttaaagtactgtaataaaagtaaatatatatttatttaatatatatattataatagaaaaataagatcaaagatgtatcttatagaccgtgtcaatgtctaaaacgtcaattaaaatggaaccggagggagtatgccgctgttgattattgtacgaagtggccatcgattggcgtccggacgatgagcagttaatgctcacgtttattatatggtcatatatcgtgatcgccaattcgtcatgagtcgatcacgacgttgacagcgctaattccaaattaaattgagctggagttaagtctgattgatcggaacagtgctccaaatctctctcgccagcgcgtctccaaagcatcatcagatattctgattacgcatctctacggtaaagtttgttgcttgaagaaaggactacacgggatcattctgctccgtcagaatcgattttcatgtccaatatttgaccgttcgtcttatttgaaaaaattataaaaaaaattaaaaagacaagtcacgtataaagtattaattatgttttatcatctaacatcaataaaaatactaattacaaaaaaaattatataagacggacagtcaaacgttgaacacgaaaacttagggtttgactttttttagggagtacacgtgatcttatcactcgctcggttacatcagaaagaggccacccaacaaacacacacccctcgagacagaacaaaaacatctcaggcttgggacagagacaagaaatgctgctgcctgcatgattccagcctactccgtactccgtagtgtcctactagcgttcccatcacatgacactggccgaacatccttgcttgtctctcccatcaaacgcgcgcggaacggcgcgatgtcatcgtcgcctcctccaagaagccatgaaatgactcgcgtgatcttggcacgcatgggcatggcaccgtttgccgctgtgctacgaggccattcacagtgggtatacgtggcatgcagtctcaatccataaaaacgaatattccttgccacgtcatttaaacgggcggcttcctcagctccgcgtagccgactttagctacgcgttctttgtctcaacgggacccacacttgtgctagaggagagaggggagaggggcgaggcagctgacggggagagaggagcggcggcgccgcccgacgccaactcggggaccgccgctgcttcggggaaggagctcgacggcactgggccacccgctcccccgctcccgcgccaccgacgcgttcgggagaggagaggaggggtggacgacgtggagaggagggcgccaccgtggagctcgtcgcagcccccgcttgcgcgacagcctccgcttgctgccggctgcgccactggagcttgccagccacacgccccccgatccgcgacgacctccgctcgctgccggccatgccagccctcgattcgcggtggccggaagaggaggacgggagggcggctccggccacgccgcgccctcgatctacttgtcggagagggagggggagatgaggttgaggtcggcgagaggggagaggcggtgatggccgcgaggtcgccaaccaccgctcaacctggtgccggccgccgccgctctctgcagcgtttgctctgccagtggcccggtggggaaaggagtagaggagagagagagagagggggagtggaggggagatgaaaagtgaaaagttggtaccggtggtattcatactacaaatactgcactgtggagcatgtagcttatatcctttttggtctatgtggcatgtgaagaacgccaaaatttagtggcgcactgtgaatggcctgaacatgctactcctacatatgctagccaccgttggccggaaagagattgatggatatgccggccgctgctgttgctgatgcagccatgcaggcgtgctctccctacgttttcagcaaactctgtgaccagaaaagatgggaatattgtcctatttcgagagatcaattatttcttgctagtaccaccaatggtcagtacatatctaatttggtaggagctgcaatttgcgagacagttgagggcttgaggcccgaaagcaacactgggtgcgagtgactggccctctgtcctcacaggtcaagcattggtttccaacatcgcagaggacacactctgttttagccacacaaacgagatggctttggatttgcgtccggtgctcgccacaacttccacggcccaaagataggaccacaccaaatacaccatggcaatatagctaaccctgtagtactacatgcaaatgcagaactacaaccatgtatatatgtccatatcagatccaaacgttctcttcagcaaaacagaacacgtagctagcatgctgattctgcaatgctgtacaccacacgctttttgtgtggatgggctcttccgtttccaagccggacaatcttgggaaagaaagcaagcaagaaaacatcccagcaacaaatgtaagcggagacggaaattcatcagttcccaaattcagagaccaacccaactactacgcaaaaaagttgtcattccattcgacgtttagttattccgccatgaacaccacaagcgttttacaacagcaagcaacggacggagccaactcaatgacagacaaaccgcacaagacacgtcgtccacacggacgccgaccatgacaacacctaaaccgaacaatggcggagggaaaaaaacgatggaaataacacgacagggaccaaggctgcgacaccggagctcagcagctgacacatacatagactacaaatccacaggcatgacacacgcctgatccgcctactttgcacttgatggcaactctagcaatggcactgcaatagccttcctctgtgcccaagtgccctctcctatctaaagagactaaccatagatagatgcatggatagatagacgattgttcatgggttggatggatggatggatacttgctacgacgatttccgaagacactatcttctcttcccttgtaatcttcttcttcaaatttgtttgctgcttggctatggatgtgtgatgctgatttcacagcagcagcagttagaacttgttgttgtaccagaagacgcccttgttgtcctcaggctcgacgtagatgcactccttggcctcgcgccatgtcgccttggcgacgggcgtcgggtcgaactggtagtactcgccgaggatggggcggatcgccttagtggcctccatggcgtggtagtgcggcatggtggagaagaggtggtgcgcgacgtgcgtgtccgtgatgttgtggaacaccttgttgaggatgccgtagtcgcggtccacggtggccagcgcgccgcggagccagtcccactcgctcgagtcgtagtgcggcagcgccgggtgggtgtgctgcaggtaggtgatgagcaccagccacgcgttcacgatcagcagcggcacgccgtagacgcgcaccacccaccagaacccgaacgccgacgacagcttgaacagggcgagccccgcggacacgacgccgacgtcggagatgaagatctggacgcgctcccggtcgttgtagatcgggccgtaggggtcgaagtggcacgcgaagcgcgggtacgggcggccggacacgttgaacgccaggtacagcggccacccgagggtgagctgcacgaagatgtgcaccagccggccgatcgggttgtggtacacgtacggggtgtaccacgccatcgccgacttctgcttcgggacgaacacctcgtcgcgctccagcgacccggtgttggagtggtggcgccggtggctgtacttccacgagaagtaggggacgagcagcgacgagtgcagcacgaggccgacgatgtcgtcgagcaccgagtagtcggagaaggcatggtggccgcactcgtgcgcgatgacccacacgccggtgagcacgcagccctgcgcgatccagtagagcggccatgccgcgaactccatcccgctcggcagcacggggatcatgaccagcgcgaagtagagcagcgcggcgacgatcacgaggtcatggaccacgtaggagaaggacttgatcaccgagcgctggaagcagtgaggcgggatggccttcttgatctgccccagcgtgaacggcggcttgtccgtcggcgaccgctgcacggccgcgccattgccggcgcggccgagcagcttctgctgctcctcccgctccttctccgtcatcctgccgccggcacccatcttgctgcttacaacaacaatcacaatcgcaggtgatgagaaagtgagaatcgattgcaatattgtagtgggatcagaaggtgcaatttgagcaatattataatgcaataatacggaaaccccacacgaacaaaaatatctcgcaactaagccaataagcaatagattacgtatgcacgagttgaggagcatcaacccaggaaaagaaagggcggcacacccatgatgcgatccatcacttttcttgattaaagtatatgtgataggttattccgagcagcgagccgagcagcatgtgcttgcccatgttcagattcgctttctagggcgtgcatcgtaagttcacatgtactgctacggatctgccttgcgcaagttaccacaagatgacaagactgatcactgtaccatagcacagtgaattagtactagtaaggccattctcaacccattagacatagtttccataaactccacagcatcaagaaactagtactaggggcctgtttggtttccagtgacttattttaagtccctgtcacatcggatgtttagacactaatttagagtattaaacatacactaattacaaaacccattatataaccttggactaattcgcgagacgaatcttttgagtctaattatgccatgattttgacaatgtgatgctacagtaaacttttgataattatggattaattaggcttaaaaaattcgtctcgcggattagctctcatttataaaattagtttttttactagtctatgtttaatactccaaattagcgtccaaacatccgatgtgatatgggctaaaaagttttagcctcatctaaacaccccctagacactactcttccaatacaaacatcactattccatacttcaatttaatgcttcttatctcacatgatgtcttggatattgtgtagaaacaatatctcatgcaaaacatagtttccttctctttactcatttattcacttgtcacatcattttttatcctatatgataacttatttaatgatatagacatcatcctaatcattgagttgggaatagcctaattacgcttagcatggtgcagtaaacgaaaaggaaatggtgattgattcaacaagcgagaaaggtttggtcttgggatgtaatgtggttttgaaaaatactagtactacagtagttatatgttcctcgataaaaatgtgcatatgtcggaacgcacactttgtccagatagtctgaactctgaaggatgatgcctaggaccatccccagaaacgtgtgcagaaggaatttatcacttgtttgggggaaaaaaatggtaccatatctgattatgataaggtcattaaatccagccatacaaactgggcggtcaaatataagctatccatattcatcagacatcgtcatatcctaatgagtggtcaattttgacgaacaattaaacacacaggaagtttcctctactcttaaaaagacaccaatctttgcaaaaaagaaaaccacttgctcctgcaggttggtggaacagtaccatcaagactaattagtataattacctagctagggtcaaattaaccaagtgcactgcacgcgtctagtctaacgcaaatgccatcccacaaggcagattcatgtgcgactgtctcacttgacttggaaggcacacgagcctaccatttttcctacgggctccaggattgtggtgctggtgatctggccttcttgtattccgattagacggctgcactcgtttgattaggatgattgctagctcgctgcacctgtttgtggctggaaatcaccagcacatgcagctaatagcagacaagccagccatgcatgcactagtggtgtgtgaactatcatactgcaagtggtggatgcaaatccaagaagaggtaaggggggccagatccgctaatctacgatttgttcatttctgcgtgtccagcttatctctggctggaaatgtacagagatagaggggggataaattggtgaaacatgccgtcaggtggggctggagttcagcgccaccctgccgacctttgcaggctgtgtgacccctgcacttttgtatcctagcgaagacatgcagctgctgcctgacgatgggcatatgggttccagaccatacagtatttttatgcagagaacagtgataatttgcctggaaagtaagaggcaatcgtcaccgtccaaatgcaacgaacgggatctgacggtggagcgacctggggatcacgatgccttttgctaggtcaagcaacccaccaagcccgcgaccgggcgggggcggcggcggcggaggctgctgcccggcgcgtgagtgcgatgtcttttttattttttcctttcgctttcttttctacaaaatcagtggcatttccaaccacaccaccgggagcacgagaagcatatgccgtgccctgccgccggctaggttccataggcgaaaaaaaaagagagagagatttttttttaatgccagaaacgacgaccgcacaagaatcaaactttttcttttcttgaaatgttgtccgtgtgtaaggtcgtcggtttgtcagcgtcgtgactcgtgcccatagcgctgagtttcagaaaaaaaaaagaagaagagtaatcggccatttcgtcctgaggcgttgaaagacgaatcccaacatggaggggccagaggccatgatggaagcatgcagccaaaggaggcagctttggtgggtaaaggtagcagctttaatcacaagattaacgggaatagctaaaaggtttggcaaaagttcctacaatgagttgtaatggcatagcgatggagataaggtacacaactacagaagcatgcggaaatggagcatatcaaactatcatcctatcggtaaatcctacagatctgcccaggagacacaacaaaatcctatagctctgctttaatccacctcaaaaaggtcccatcaatccccggcggcgagacgagatcaacgacgacgagctcgcctgtcctatcccccaatccaccaccattactcccaagaacacaaactccacagagtgaaaacaaccaaaaatcaccgcagcgatttcacacaccgtaccgaaatcgaaaagaatcacgaaacaacagcggtggcggagggtaatgtgggaggcacctgagttagcgttggtagatttcgcaggcgcggaggagcggagcggcggaggcagatcggggtggggggcgggcgacacccttcccttgttccctccctctttgtggaggaaacgagtggtctgtgcaggggaggaggagaggaggaggccgcctccgaatccaccgggtcgatgcgctatttaaaagcggtccgtgcgacgctggcgcgtggggcccgacgcgcggacaggtggggcccaccacaccacgtcggagattgggaatctgacgcccgcacacgtgtcgcgacgtgtatcgcgcgcccggggggcggccttgacccggatcggggggctggggccgcgtgggccgtccgctgcgtccatccgacggccgggagcgcgtcgccgtgctggagggatcggccgggtggggttttcttgtgaggagggaggggtttggtggtggtgtcgcggcggcgcgatgcgaggagaaagcatatggcgcggcgcacggcggcggggggaatcggtcgcatccgggtaggcttcaacgagggagagaccgagagaggctggaaattggcaaaggtggatcgggccggatggcccggatccgagccagattcatgggaaatcgccgagagagagacgaccgccgaggcgagccgggagaaacggacgaagaaggatgagatatgaagggatcttgggcttttctacaaagtggtaggtcggcttccattgacatgtggcccaagtgatgtatgtatgtatgtataatttgtcctttaactttaaggttttcaatgcaaaagtttaaggcacacagcagctagaatttatacaggggctgaaacaaaaataagttagttattttgtattcagcgaagacaccaacctgtagcttagagagtggttttgtcacctttcttttcagatcaatctgatttgagattttgctagtggtttggtactttggtttacaaaaattatgcgatttctttgacaaccaaatacagcatttgacttcgaagttttaacggcatttttgcttccggtctttatttgaaatgggtggcgctacttggctacttaattcgtccaatactccaattaatctaatcccccaggccttgtctcactaatcgctactgtactggttttttttttcttctaacgcatttctcatgtgcaaagtctggttttgcaagcatacttttctttcagcagatgtctaacttcattgctgtagtacgtaacacgtacagggtcgtgtcctctgtccagtgcacgattttattcaaactactcgtcgacccgaagtaaatagtacatggcatactattgttggatcgtactattagatatggatcgtttgcttgtacacaacccttaagccattatttagaagattataactcgtaaataacgtaaggcgagctttgctttgtgattactgattagccttgtgcatggctcctacgcacgctacctgttccaaagccttcgtttgatgacaatcatggccacgtgatggcgtattctgaactggttttgcagcaaaaaatatctctcagcgagtcgccctcgaatgtcctcctaacttggcctttgggttatccgccagcttgtgtcttttcagcatcaaagtgcagttgcgcagtgtgcaacgccggaaaatattctttcataaattcaggaacccttcgtcggcaaccccttggccgccgcataacagcggattagctaggatattcttcagcaagatacacgcatacaggaaagatgttcatttattattagctagtcacttttctctccaacgatacagtaatatattaacgggttgattattattcgtgaatcgtgatttcgactaggctactaattcctcgacctaaacttcatggtatgcagcagaccaaacgctctcagtattatatcatgtcttttccattttgtttagttaattttggtcatcagagtcagagaccgatcatattcgcgcccacttgtgtccccaagttggtgtattggtgttcgtactgtatactccgataaaatatactgtataacataacatgtcccgtaatgtatatgctgacatatactatgtactccagctaacacgcaattaatcagctgcttcgtccatcgatctaaattaatgttactgtcctctgcagcttttgcgtgaattctcttgtcgcctgcaacgatcgtgcccaattctaactgcatcctgcatgtgctgcaaagatatatagagcactgtgctgctcgtagcagtgtacgtccaacatcacccacagtcttggtcacccaaaactggtggcgagatgaccgtgttcacggtccgtgacagtatcaacgttgtcatccatgtggtcagacactgatctggtgagatatctccgatctgcccaatagttaggtcgattaattaggtccctgtaggtgcaactggttggaaaatatatgtgctagatctagcagcttagcacggcgcaagacggccattgtgttgtcttcttgtagcgccggggactactcttagacggtacttaggtagtacagtactacgtacttagtgattcgtagtcatgtactaatggcattttgctttcggggttggtaattttggtagttttgttaaaccaaacacatgcgtggatctacctggtttggtgaccatacgcactaggcagagcacagagcagtgccacggtagcacggtcagcgagtactccctaggaggctgggattgtgcttactggcagaaagcgatggactggacttcatggcagttcagaaacagattgcttttttcccccttttaataaaatgcatgagttctcaaaaaaaaaatgacttcatggcagttgcagctgtgttttttcttttcttttattttttggaaaggtttggttgcctggctatatttataagaaggcagaaacagttacacacaatcgatttacatgaagcagataagcttcaaagagttgcagctggtatttttgagtcctgtggcgcagcacatatcaatttggcacaatttgcaacatggcaatttgggatggtttgtcagataaattccttggggaggcttcagtgcgaagtgggtgtaacgggtaataataatccactgatacgctgttatatatagagtgcgtcgctgctaattcaatgcttcgatcaggtctattctggcaacagcgtccgtgctgaacaatgcacagatttgcaggaaaccatatgtgcggactaacaggattaatatcggtagaattactcgcgtgacagaaagctgatgatgcacggccatccccactagctgtgccctaagttctacggggacagagatcagaaaagaagaaatggctatagctccatcatttcaattcaagaaggtagtgtggtacctcactttgttctaaaaaagatggcacagtgcgttgcagctttcaacggtacaagctgttaattgagtgtcatcatctgtacaccaaggtctactgttgcaatattccaaaataaggacgatatttagacagctgaaaacaatattttgttttctttcagtaatgatgctgctatactccacgcggtccggtctgcagccttgcgcttgtgcttctagacgaagtacagagtctaaaataacttgaactcgtttttttttcctccaatacgcaagacaacaactactactacttctcatcccgttagcacatcgaaggggatacagctctacctgatgttacaattgtagctttgcagtaaatgtgctcctcgcttctacccgaactcgtgatttgtgagttggcgcgatgcgcgtaagagcaattataatataggttataagctagctaaatgctgaggtggaggagagagagaggagaagctggctgtaaacttatagccggcttggatacaagaaccaaaaaactatataagagagataagtgggtcctatattaattataaagagctaactattacttcctctatcccagtaaaattgacgttttaaggttagcaaccaagattagttgttgtgcaaaattaccaaattgtccccatgatttgattcagcttgtcatttccagcatttatatatgcactcagaatattctagaggatgtttccagcagtaataaagtaaccacaactcactgccacgtgtaacagggagtacataaatcggcgccttggccacacgtttgataaaggggcaaagccattattaacatattcaaaaatttgaatcaaccattaaatttgctttggcgtctaaagtgcctcttctctgtgtagcgacatattttttgagataagcctggggcgttgaacgtcaattttactaggacggagaaagtatatggataagctgagaaaatgcctcttatagccaaccttgctcggacgcactgtggactgtgctaacatggcgagcccaagtgcaaactgctcgagcgagcgaagcagcctcggtaccaacgccaacgaattgctagtagatgttctctgtagtctactactactagtctgtacgtgtcatcgacgcccacgacgcgtgtggtcggcactcggcagtcctgccacgtcccggccgcgtgcggcgcacactcaccagcattggcagtatctgcggcttgccgccgcacgaccgcgcggggtaggtgggctggtccgtgtgcagcgccctcaccaactcgctgtttgggccaaactcaaagctacaaattccacacacatgtattcaagctattggatcgtcacaagattcagaagtcaaagtgtttagcacaaatccaaggaataagttcacttggtgacccttaaaagtgattgaaatctaatccgtaaccctaaaccataaaaccagatattttgacccctaaactacggaaaccggtgcaatttgactccctcggcggttttgtaggacggtttcgctgacgtgacggtattgaccgggttttctttacacatagcattgatgtggcgcttaggtggcatttcaattaaaaagttatacgtgggacccatttgttattcacacacacaattgtggggcccactgacatgtggccccacacgccatcttctccctttcttctttctcccctcccttatctctttctttctccctctcccctacagccgtccgcggggagctagcggcggcggtgacgacgaccatgggctagagatgaagcggcggccgctcgccgttcctctcgcaccaccaccacccgcaccacccagtgcccggcatcgagacgtcggcggctaccgagcggcggcagcgacagcccgcgggcggcgggcgggagaagcagtgggaggacgaggggaacggcggcgggcaggagaagcagtgggaggatgaggggaacggcggcgggcgggagaagcaggccgcgacggcgactttgactttgactcctgaaatggcgatggcgatggcggcgtggtcggcggcgaagcggccgaagaggaactcggatacctcggctgcaacttcccctcgtcctccctctaccacgagccgccgccgccctcgcccgcccgccctcccgccgccgccggctccccacgtcctcctgccacaagccgccgcactcacccgcctgccctcccgccatcgccgccggctcccctcgtcctcccactgccgggccgagctcgttgtaccccgccgcgtgtgcctcccgccgccgccgctgtggtctccttcgtcttcgtcacggtggagctcagcccgggtgccgccgccgctcgcaggtcgccccaccatctccgcctgctgcggaggagagagagagggggagagggaacggcgaggagagagagggaactgagggaggggagagagaagggacacgtgggtcccacaatctattttctgtgtcattgacaaatgggtcccacacatattttttaattctaaatgccacgtcagcgccatgtgtaaaggagagccggtcaataccgccacgtcagtgaaactgacctccaaaaccaccgagggagtcaaattgtacaggtttccatagtttgggggttaaaatatccggttttgtggtttagggtcacggattagattttaatcacttttgagggtcaccaagtgaacttattcccaaaatccaataatacatggttcgaacatgggctggctatatatagctcctggagtttagtcgtgacagagaagttgcatgggccatacatgattctgtcacgcgtcgttattactacggcaagcctagttgccatcccagtatctaaacaggagccgtcacgagttacaggcccgaagcctaaacgtgcacggtgatcttgttcgccttctcctcgttgctgtcgagcttgatgcccttgtaccacacggcgcacgcgacgtacacggcgaggtcgaccagcgagagcgcggcgaggaggaagtagaacctgtcgaggtggccggagttgaggttcccggggatccacccgggccgcctgtcgccggcggtgaggctggtgaccacgctcaccagcatgatgctcacgtagttccccagcgagatggacgccatgcacagcgagctcccgaagctcttcacgccgtcgggggcctgcccgttgaagaactccagctgccccacgtacatgaacacctccgacgccccgatcagcgcgtactgcggcacctgccacagcacgctcagggagctcggctggtccggcgcgcccacccgcttcagccgctccacctccaccacgccggcgaccaccatggccgccatgccgaccacgagccccacgcccatccgctgcagctcggtcagcccctgcgggttgccggacaggcgcgacatgaccggcacgagcacgcgccggtagatggcgatgaacgccagcacgctgaggatgtcgaacaccgacatgctcgccgcgggcacgtggaacgacccgatgttggtgttcatggtggttccctgctccacgaacagcgacgccatctgggtgaacaccaccgagtatacgatcgtgcacagccagatgggcagcatcttcaggatgcacttcacttcctccacctgggtcaccgtgcacagcctccacggatcctgcatgttctccggcgtgcagtagtcctcctcggtgaccgtcgccgccttgtcaaggaacctgaacaccaaaacacgccaccaaatgcacatcgattatataggaaactattctaatccctcgaatggatattccctcatttgcttaaaaattatctaaacggttatgaaaaattctgaaaaaatttgataacattcatacaacacatatatacatctccacaaaatcttaagtccaaactcaactcacacgtcgagatataaaaaagacaaattcagcatatgaatagtagcgtactgtttatatctaaatttgtttttttttctcgatgtgtagatcgaatttgaacttgaattttggtggactagtaggtatcattatactctacattgtcaaaaaaaattttagaatttttcacaactatttacatcgaatttagaagaaaaaggtatacgaggggatatcccctcgagggattagaatccactcccgattatatatctcgaatcaacactgtttgatgcctgagtcaaacggcaaatcgatcaaagtgcattggcacatcgttcaaacaagatattcacctgatctggtcgctgtggaggatctttcggatgccagcaatctgggactcgtcgccgtcaacctcgtgcaggagctcgctgcgtggcacctcggcgcgccacttgcggaacgcggcgacgaacacctgcgcgatgcgggtcaacgggttgccggtcggcttgaagtggcggtagttgggggtgccgagcaagaagagcacgagcgccatggccgccgccgcggccgagacccagaaccccatgacccacctcccctcgtcctcgtagtacaccagcaccgtgttggagaagagggagcccacgttgagcgccaggtagaagtagctgaagaaggccaccttggagcgggcctccctggggtccgtctcgtcgaactggtcggagccgaacgtggcgatggacggctggtaccctccgttgccgaacgcgatcatgtaggtcgacaggtagaagagcgcgacgccggcgctcgacggcgcgtcgcagtgctcccccgcggcgccgcagccggtgggcttcaccagcaagaaccacgacgcgagtgacagtatcaccaggccctgatcatcagcagaaagttcagaacaacacacacgacgcgtagttcagcaagatcattccaacaacagaagagctaattaaaaataataataatataattaacttgaccatcgtaccgtgacatagatcatctggaagattgcacacgtgatgtatcggccccagtaggagtcgctcatgaaggcgccgatgagggagaagatgtagaccgtgccggtccacttgctgatgctgttggctgcctctgcgttgtcctggtggagcacccgccgcaggaacaccacaaggttcaccccgacgccgaagaaggcgcatgtcacgagcccatagttgactgcatcaggaacacacctgaattaactgtccaatcgatcccaaatccaacttgtaacagcttatatattgaaaaacaagattaggtagattctgcacatggctttggaagtgtcctaatgcaacacaaggttgaacttttttttttttcgggaatacgaacacaaaggtttaacacagttcacaacaatcggtcttctgaagtaaggttttagtcaggttggttattgcccatgcagagtaaatctggatgaagagcaaaacgcgtagtgttaaacctgaagagtacagaattgatagctttccaacggtggatcaacctccaggtttggctgccactcaactggctagaagctctgcaagaaggattattcttgaaggttccagttggtggaaatctgaagtctgaactgcatacaactcagacagcgaagtaggaatttactagcaaataacaagctataaggttgtgatcacactatgtgctgacaatattagttcatagttctttgaagactgaaacataacctaatctaatcaacaaccaacgttgtcatgttgggaatccaagaaaagcagtttttcaataaacaagaaaccaatcttattaaaacagttaatttgtagatatatgaataacagaattaaagtaaaacatagctttacctagcaagaggatggaagatctccaattcccagtttttgctttaactgccggatttcctcgcctgtccattgatccatcttcagtgatgtcagaaatccttttcgaatcgacagcagttggagccattgccttgctctatgaattttccaaacaaacaacaaaacgccgatcacctaatggctgatttaaaattttatttcaagaaacaagtagccaaataagaactaaacaataggaaaaaaaaaacgccgatcacctaagctcttttttttttctagctttgccagttccagaaactacaatttcattttcaataattgtctaggtttgcatttccacctaccaattaggtggtttatgttggacaataaacatcatgggtccgatgaagagacaaggggttgcactcacgtgtgcgtaggtacaggtgcatacgtaatggtttgtgtacatatatacatctttggtgtagaaaaaaaaaaacttccattaatgtcagctggagtatcgtttcggttcgatactttaaagtccatcgatacatgaggatgacctttcgttcaaaaagaaacatggagatggcagttgtttagtttctttctttccttttgatgttcctggaccctttgcaattaaaggccagagttcatctttacttgcaatagtactcagatgaagcaagtatgccgcgtgactcttatccgagcgaaaacaatgtcatgctcgaaacgtttcttcttggtttaaaataatacccctccgtcccagatataagaagttttaagattagatacgattattaagaaagtaattagaaatgagtagtggagagttgtgattggatgagtagtggaggtatgtatgaaaagtaaatggtggggattgtgattggttgggaaaagaatattaatggagaagttattatattttatgacaaatcctgaagtctaaaaattattatattttagaatggagtacatatataaagggcggagctagctacgttcatcaccaaggttagccgatgaaattccaaaatcatttagtaaagaaaaaatttattgtacttgagaaaatatctcgagatatcaagttttctatattaaaatttttacgctataaatattgtacctttcggtgaatagtaaaattatcctttagtaagatattgtttgaattgatggctcatcacgctatataataaagctgacgctgatgatagtttcgactgatttcgcctcttactctatataacattttgttcattacgctggagcgtgcaccaagcgaagaactggactaactagaactcgtgttgtgcctgaagattgtcccgtggatataccttacctttctgtttgttgttatatatcgtcgcccttgtggatactttctcgtttttttttatcaagggaaaacttccgggccttttttgctttaacctgtgcgagacaatcttgtcagagatgcactaagcaagtaattaaaagctgaaacgactgaagaaaagatacctaacaccgacaaaggggccctcgtccttttccgggggcccatacgtcagtcgggtgtttacacagcccatacgagctgaaactccttttttttacgtgataaacaaggagcttgagtggtggcaccaagcttgtgcacagtgcacagtcatatatcagactattcataacttacagggtaccactaccatctccaaacgtgatggcacatgtagtgtatatcacacggccacaccaccggccggccctacgtacataacacgtacgcatctctttgtgcaagcgtaccttcgctgatgaaccctccggtgcggacgcgcagcggcggcagctcgcacttctccggcgacggggacgacgacaggcacgtcacaaaggaagcgacgacctccacgacgacgacgacgcagctgctgcccaggcgtccagtcatttaccggcgcgagatcagagtggtgtgtgggctggtggcgaacaccgcaagccttacctagctaaatctcctcaaacaacaacgcggtagctcgatcgcgcgcaacgacgcgatcggtgaaacgccgtgctgccgcgcgcgcgcgcgcgtcggctgctgtgatcacccgcgctccctgatggaacgatctcttgtaccgcgcgcgcagacgcagccggccggcgcgagcgcgacggagacgcgcgtactgggaggtgtgggaaatggagggggggggggggggggggggaagctagctagctagatagcgggtcgtgtgtctgggcggtgtatggggcgcgtatttatgggcgtgcgtcggggtcgggccggcggtgttggatgccgttttcgtttcctcctgcggggccggggcgagtagtggccgacacatatggcactgtggttgtgtggcagcgtgcatgggccgcgccagctgtttccctttaggccttttccggccccaaaataacggggatcctgtgaagtgcttggcagtagaccagagagaggcctgtgaatttcaccgggagtacgtaagaccgtgcgtatgcttaatcgtcagaacaatgcacgcacgcacgtctctagtgcgtgtacaacagtacaagtaaagtcagatggatggacggttgatcaggtttaggtcgccgtcgcgaggacaatgctactgctgttcgtagcgaaaaaaatgcgtcgtatagtacataaggggtacatggcgtaatgagctggaagtaccacactttagttagttgtcctccatttttgccatttaggcttgttataagctactccctcctattttaaacaactatccaagaaactatttatctttaaatcttgacaatcgtcttttttttaaaaaaaacactgaaaacttatattattgaagtgacattctgaagttgtgacagtaaaaacgaaacagtaatactcctatttaaactagatactattatcttgaactcacccggtgagaccgatcaatttttttttcacgaatctgcagttcgtatggtcactagtactccaggactacgattccttcgggaacaaaaaaacggtagagacacgtgaaaataattattgtgatcgagatgcatcgttttaactggctaagcgtcctaaaaggatctcaaggacaagaaattaaagcgggtcgctgtgcttgctggcgcgacgtgattgaacaacattgcgacctaacgaaggacgtaagacatacattaattttggaggtatgattatgttttcagtcccatggatacaaaattaaaaccatatgtactctgaactctgaagttccgaaccgtagcctctcaaagattctccgcacacaaaatatgcaaacaactaaaatgaaatggatggttgcgcttttttatgcatgaggagtatgttacaaacgaggagaagtactaccagtacacgctctatgcaaatgtccttgttgatcatatattcaagcacgttgctcgagttcctcccgcgtgccacgtccttgtcagaaatttcgagagttttggcagtttaatttgtcgttggtttactagatatatgcgcaaccacatcagcatgacagtacgtaaaacatcagacgcatatataaatccgtgcggcattcaactggcagctgcatcgttccaaattactgtaacctgtgcaaaatgccaaaatctcccttccttcgcggatgttctccctcccctcctcctttgacttacgtaggcctcgaccggccggttacagtcttacggataacttatgctccagcgatgcagctgctatagactgtcgtcataacaaagaaatgttgtttaattacgtcctccttattatgccacttctaacagtattagctggcatgcagcacgtccctacgacgactctcctgcggccggtacgtgtcgtgagatcacactactcactacaccagctcactgcactgcacgtatcaccgtctagtgatcaactgattatcctactggttataaggacgctagattctcgcctatccgacgcacagctcacgaatccgacacgcgcgacgccctccacgccgcacgcccacccacatgccgttcactccgctacgccgctagctgcccctgtcgccgtcgcgggcggcggcgtcagcggcgtacgtacactagggacaaagccagctaccgcactgatgatcaccgcgcgcgccgtagagtccaaagcgaaatcggccacacacactctgcctgccgctgcatatgcatgcggcagtgctcttgccaaactacgtaacgcatgcatgcaccgatcgaggcggccgccgtccgatcgatctcgattgcctgacggcgcgatcgtgcaacgaatcttgcacaaaatccaggcattcgggcgaagccgcgaacgtcgcggctcccctccttttgcagacatgcgtgaccgccgctcacagtgctattgctttcgctgacatagcgagtgagacaccgagacggtcgtcggtcgagcagtgcagcgacgcatgcacgcatgcggcagtcaaagcgtacgtatgctttttctttctctctcgtacgtcgattgggagaggtcgtcgtctctggtgtacagtgtactactctctctacttctctagtctctgtagtccaaccaaagagaggcagcaaaagatcaacatggatacagccagaagtgataagttatcactggatccaggtcaccttatgcatgcgtgcctccagatcaagtgaattgtgcagcattgtcgctttcattaattagttgtgtcacgtcaacgttcttggcctgttagcagcactccagtctccagctagtgctcctgtgttttacgcttttgctgctgttggatgttgccgaccgaggtcgctgatagatgctggattgctgccgacttatcgcggtttgttggaatcttcctctttcagacacaaaagaaacaactttgttgctggacccgtcaaaaggtaggggagaaaaataaaaggcagagaggataagaaaatatcgccggtgaagtcgatgtggcgtttgacagagtacagttgcgtgaatgcgtcgatcgtcgatcactgtaacggaccaagaacacttcagtggatattagctgtatgactgtatccggttagctcaggacctagccatatctagggtccgcatatcaacgagaaaaatgaaaagcgaaacaacaaaaggactcaaacgcccgtgtagtagccgacatgtctaatgttttggaacaagttcactttgagtctcttaaaaatgacccgaatctaatccataaccctaaactgcaaaaccagatatgtcgaccctcgaattattgaaaccggtgtaatttgacttccttggtggttttggagagcggtttcgctgacgtggcggttaggtggcatttgaatttaaaacgtatatgtggactcggttgtcattcacacacataaaaattgtggggcccactagcatgtgggccccacatgccatcttctatctctttcttcttcctccctgctctctttctttctctttctcttctctccccataatttttagggtaaattgaaaccatgccattataattttgcaaagtttgagatataccatcggtatctcaatgacatgacatgtagaacccacatgagtcaatcacatgtgggtcaggatggcatatctcaaattttgtaaaattataatggcatggttccaattttccccaatttttatgtgtgtgaatgacaacatgtggagtatacatttttaattcaaatgccacctaagcgccacgtcaaccccatagactaggtcaacaccaccacgtcagcaaaaccgtcctccaaaaccaccaggagagtcaaattgcaccggtttcaatagtttggggtcgagatatccggttttgcgatttagggtcatggattagattcgggtcacttttaagggaggcaaagtgcacttattcctaatgccttctaacacgatttttacggcccgtttagacccatagcccacaactccagttggaattcacggcccattataaatttatgggcccagatcacggcccatgcagaaataactgcggcaactgctcactgctcagaccaaccagaagccaaccggagttaaggaagaagggaaggaaagccacccgagcaagcggatcacatcgaggtaggggaggaccggaggagctgagctcagctcggtgaggggtggactgggagtgcgtgggtgggtgtgatggagtggacgacggtggaggcggcgaacggggccaagctgagcgtgcggctgttcaagccggcggcgggggcggaggcggcggcggcggaggacgtcgcggtggtgctggtgcacccctacacgatcctgggcggcgtgcagggcctgctgcgcgggatcgccgagggcgtcgcgcggcgcgggtaccgcgccgtcaccttcgacatgcgcggcgccgggaggtccaccggccgcgcctcgctcaccggctccaccgaggtcggggacgtcgaggccgtctgccgctgggtcgctgacaatctcaacccgcgcggcgtcctcctcgtcggctcctccgctggtaggttgctgatttttctttttccccaaatgacgtcggtgcccttgtttcattctcaccgaagcttcacagaagagggttatggtaatcgaccaagtgatttgctcattagaaactgtattgatctaactgaatatgcaattggcgattagccacttaaatggacctgcaagaaaatagaaacagcttgtgcgttgcagcagaactgaagtatcaggtttttggtcttatggatttggcatcaaatatactagcatgttattatttcagtgtctttgaagtacaaatacagagttacctgggtattagtcacattgatttgttttaggtgactctgtgcagatgcaaagtaatccacaagaagtttcaatggcgaaatttcccttctgtcagggtagcctagtgtcctcagaagcaacgtctcttgcttgtttacagctagaaccattgtttttcagcaaatcctgactttaggcaatatatcataacctatttttatgagcatatttacatttagttggttgcttctaggtgtacctacttctggcctattcattagctgtggctactgagacctactcaaactgaacctcttcacgcgctgttccctggactccaaagtcatacatatagttatgatttaagatttatgaattcttatgatttagttatgtcaagttgtcaacagatagtgctgcaagtataactgattatgtgtaaaacaattgtgttaagataatgactcatattccacatacaagttttcttcaaccattcttgcagctgttagatcatgcttagtcatatatctatatccactttcctgatgcaggagcaccaatagcgggatctgcagttgataaggttgaccaggtcattggttatgttagcattgggtacccatttggtctaatggcctcggtcctatttggcagacaccacaatgctatcctcaagtctgagaaaccaaagttattcgtcatgggaactaaagatggcttcacaagtgtaaagcagctgcaaaacaagctcaagaatgcagcaggacgggttgatactcacttgatcgaaggagctggccacttccaaatggaaggccctgcttttgatgcacgaatggttgaccttattgttaatttcatcaaatccttgcccaaatagcattgacagtgactgtgtgcaaatttgtcatgattgtagtgagttagtgacaaacaaaagaagctattgaacagtgcattcatggtgtgtattttctcatcttgtaattgtacacttggtgttgtaattttagttcaatccgtgtttctttcgaagcctagtgtaagatgatgagtttcagatacaatacatttacaggatatgacatttcatggtttcagtcatcaagttgttaccctgcactgtgatcaatttcttccagatgttgcccattcagtatgtacatgcttctccttgtgagtgcaagtggtcaatatccttgccatttaccagtccaaaatatatactcattttatgataatggaacccaacagtttcctggttcaggtaggacttctgtctgtcgaagtcttatatgtttgttgaactgtaactttatcttggttatataaatgctgttgatctcatccattttttgttgtcaggcttttggtggcctttgtgacgatgaatgaagaaccgagttaacagtttcagaatcctgttgatccaaagtatattctttaaacattttgcccgggccacgttagattcggctgtgttgtttgaggggttttgtcagctattaagacctgactgatgagccaactaagatgggaaagcatatgcaaggttgctattctcctgctgttgttgagtctgcaatcctaccaagagctaagtgccagttaactttctgtcaaaaactggtgcagaaaaaagacttgcagcttgcaagttttttaagcttgtagccagttaactcgtcataggttagacttgaatcgagctaagagatggctaactcaacttgcatagttatgcttctacagaaaattggtgtctacagtacttttagttatctgtcagcaaatggtgtgctggtgtggtcatgcagtgccctcaagagtgtggtcctaacttgctttgctttacttgtaaaatctgcatcgcagcttcagtgcaatgtttccccagctgatgcgatactgatgagactcacatgctgatacagaggtactaatgaaacaggcaggcttttcttgcccatctcatgtatcctgatgactggattatacgctcacgagtcatgaacttatccgatgataaatatccgaaatgaagaggtcaaatgaccccccccccctatccaaaccatatctaaatttcaaaagaactagctggatggcccgcgcaattgcgcggctagcatccaaacaaaatcatatctttttcagtattattttacttaagatttattaaatagctatccctatacttttaattatatagtttttaaaagtcacatcagctgctaccccttacttttatcagatacttctttatttgcttgctcggtctaccactatttttattcattctccttaaaacctttaaaatttggatcttatttgagtttattatctcgttgggtttcgtttttataatttctagaagtcccgtcgaacgctgccattatactcctctacgggccgtccactgtcttttctctttattatcattgggattttacaaatcgaatataattatcgttcgggatcatttttttactttctataagtcccgccaaactgtcagtggctttgccattatactcctttatggctcgcccgctgcctcccttctttattgtcattgagattataaaatcgaacatgattatcattgttttttttttactttttagaagttccgaacctttaaaaattggaccttatagtttttagactttattgtctcattgggtttcattttttataatttttagaagtcccgtcaaacaatgccactatacttctctacggcccatccgccgcctattctttattgtcattaggattctaaaaatagaacataactatcgttggaattcattttttattttctagaagtctcaccaactgtcgacggctctgtaactgtactcctatacacgccgcactctacttctcgtttttgttatcattaagatttttaaaatcgaatatgattatcaatgggtttttttttactttctagaagtctcggcaacagccttatccgtttgcttcacgtcctacctgtcgtcccttcttttaataatcattaggattcaatttggtgttttactaacagtttttatatgccgtatcaaccgctaccactctactcttttataggcatgttaattaatttatctcgtcatgtgttttagatagtcttttttttccaatagtctttattttttatcatcaatttttgttatttataaattgtattcctaattgaattcttttttcttttttaatttcagaatttattttttttcaaaatttaattaatacagtatagtgttcttttaatatttttattttttattttttgaattccagttgtttcaaaattgtattcctacttgaaatctcttttatttttctaattttggatattattttattttttattatgaattttaattaatctcgtattgggttcatatattttcaatattgcttatttttaatttatattttcaatattgcttatttttaattccgaatttcagttgattttaaattgtattcctacttgaactcttcttttctttttctaatttcagattttatttttatttttattccgaatattaactaattcgtattgggttcttatatggactcctatctcaatattccttatttttcaattacgaatttcagttatttttaaattatatttctacttggactctccttttattttctaatttcggattttattttatttttattgtgaatttcgattaatctcgtattgggttcttatatggacacttcttttaatattgcttatttttaattccgaatttcagctatttttgaattgtagttctacctggactctccttttctttttctccgattaatgtgggaatttttagcccccacagacaggggcggagtcaggattaaaggccaccggggtcatcaacttaaagcttttgacagaatggaaaagaagaagattaaagaagacatgcaaaatgagtttatcattagcacaaaattaattaagtattagttattttaaatttagaaaatgtattaatatgatttttttttaaaaaaataaagaatttttttgaaaaaatatacaccgttcagcagtctaaaaaacgtatgcatgaaaaacgagtgatctcctctctttggcttgtgaatgaacgtagcctaataacaactctacacttttatgatattcgagagcagaattcctgtatctaaatgaacaccgctataattttgatttaactaaaagactaggtagatcatttttttgttctctcgattaatgcaaaatcttttttaaagttgttcttgtgttttttatcgatcaccagcaacgaatgaatgataattgaaataggctaagagcatttcctttcatcatacaaagaggtataaatctgaaattagctagtactaactgcttaactgacgaagcaaaagcacaacgacgaaacaattaattacaatgaggcttaggaaacaaaagaaaattgactcgggctttgtgcatgctaataaaagaatcattaatcaactaggatcgtaacaccaccaagtaaattgttttagtttcacgtactacgtgccaggtgaagacgatggctggggtcatttaccatcttatgccggggtcacagctggtagaatttgagcatcaccgtgcattcgctggatgtcatcggtgtcagatcaccccggtcgttagactgtggatccacccctgcccacagcgaacgtggtttctcctttgaaaactgtcttaataatataatttaataatataattgatagactatatcttttataatgtactccgtttgttcaaatgagtactagcagcgttcataaattccgtttgttcaacaagctcttgtcaaaacaagcatgcctcgtttgcaagttagcggtgagaattgaaggacggttaattgggagaaggtatataatgatgacctgacagcaagaggaacatgtacgtcttctgtataaatgcttgagagaatcatctcaagatacacagtacagtaatacagagatacagtagtgctattgcactagcgatcagtacaacctcctggttggctaccttgataagaaactgtataaaaagatgaattcaaattcaaagtaaaagagataatacaataaaaaagtatagcatgtgtcaggatacggtataatttaatacagccacttgctgcagcagctgaagtgtgctaagatttgtctcttcatggtattgcagtaaatagaagagacctgatcattctttactctgaaatactatactgctaaactttttaacttagcactgtttgagaagtatgagggcatctgcatgacttgcactaggaagcacagtacggagtagagatgaacaaaaactgtgttgacctgttcaaatgaattataaacacgaagttttcttaggtaaaggccatgaacaaaatattgatctctatctgaaataaacacctgtacagtacaggagcattgctcgcctggaagctggagccaatcgagaactgtggcatcgctttgaaagcaaaatgaccttggacgtcagggtgtcaggtgttgccgtgttgagttactactggctgtcctaggtgtttaaacatccagaaacatggaacaaaaatcccatcatggtaaaagtaaaccgcttccctagggctagggatccttctgtctttgcttttttaatctggaaaatggcaagaagccaagaacacacactctctctcagtatttttcaacggttggtaagctgtaaataaaagcataaacaaacagcaaatgactcctcagtagtagtactagtacaggagtagcagtactcccttcgtcccataataagtgcagttttgcactattcaccgttcgtcttgtttgaaaaaaatttatgattagtatttttattgctattagatgataaaatatgaatagtactttatgtgtaacaaaattttttaaattttttcataaatttttcaaataagatggatattcacgactacacttattttgaaacgtaggtagtattaaaaaagcttcatgagaagaaccaaatctctctctctctctcacacacacaaaccccagccagtgcagctgctgctgctaccccagaagctattggagcccaaccatccagaactcccagaccccagagcactagttgttcatttgtagagccctgagtcctctcctgcttcctgaacaccacatcccaatctttgctgaaacctcccgatccgcgggtacttctggcatcgcaaaccgaatattaccgccgatccattggatacccagcgtttcttttcctgtagcacctgcgaaaaattccatcttttttggctaccaaacatgaagaaatgggatgcatgatgctgcttggagtggacgccagctatatggaaggtgagtttcttgcttgtcatccgtggaaagaatggttccgatattgaatcggtccttgttttatgtttcttgttctctatcgaaaaaaaaaatccttttgttaaacttatcttgatagatgcgtattgcttgctgttttgtatagttttcatctggatatttatgttgcttgatctggatttgcaacttctttattgatatggatctcaatagacctcaaactttattgcttctgcaccccaagaacccatttcatcatgaactagttagatgtaacagcatgttgttcttggtattacgactgcagatttctagcctatcttcttgattggattgtcgccatcgcgaggtatctcggtgaaatattgagtactttccttccaaatagcaactagagaaaaacatagagcaacttcagtagagcctgcagcttcagtgattgtctgaataaatcttgtcactgctaagttggatagatgggtagaggaagaggcagaggaaagaagctaacgattgtccggagccatgaagacaaaggaagcggcgctgaagaagctatgcctgcaagaaagaggaggggaaggccacaaaagcgcttcgccgataagattgatcaagtagatgtggaaaattttgtagacaatgtaattgatggcgaagaagtagaaggtgatgatgttaagctgaaggcatcaaggctagacaagaacaccactgcatctgctgctggtaacaagagaggcaggcagctgaaagaaagctccaatcttgtcctggaagagagtaattccagtgttcgatcaagcagtgatgaatcaactaggactaatggattcaggcagattggaagccggcgcaaaaacaagcccaggcgagcagcggaggcagggctagaatgcaagtgagtccatctacacaatttttcagtattcagtagacttcattttttttttctcatcgtcttctcttcagtagttcctcaatgctgcgaaatgtaagcaaaattatgtactgattgctcagggttttgccaatgttgaggcaaaacaaatgaactgatagtactgtacaccaacaggtgttcagctgctcttccaagctgaatactattttggcctgcttgtagcagagctctcaacagctggtgatattagcagaaattcctgcaatcttgattctctttgcctcttagagcagctcagtttagttgctaaatagacggtgttcctagcctggcaacgctggataggtttgttcttaccttatcttctgagtagtgaaaatccagtctgtttgttttttaattagagctgtatttctaaacatttttatctccatttggatactgtcatatttcacattcatacttgagaaaaacagcacagtacagttgcttatgtatatatgtacaagtgtaaaaccgaatttggtctaccattatatatgtagagcggggttgggttgcatcaggagtacttcgaaaccaaatttttgcatcaaaaatagaatatttttggtataaactcatctgaattgtatcactgtttgatagcgccgtatttacaaacgtttttgtgtcggctgagtactaaacctgagaaataaaccgagggcgttaagtgtagaagtcaaaactaagctaatggtttcagtggctaagagtatttttaaagcaagcactgtctggtcttggaaacgtggttaatgggccaccaccacggtagcaccaaactaaccttaccagtcatgtgctgatcctgaggacagatccaacgtataataagcatctcgtcggtcatttcgctttgccatgcccagcagtggcatcaggctgcaatgagcgcgcaccataatcatctagagctagaagggtgtgtttagttcatgctaaaattaaaagtttggttaaaattagaatgatgtgatggaaaagttagaagtttatatgtgtagaaaagtttcgatgtgataaaaaagttagaagtttgaagaaaaagttgggaactaaaccacgccgaagacacggcgaggtttggcacggagacgtggcatcgatgcaggtttcactgtagaatcagcgcagaggaaagcagagcgcgattcatcagaggcgccgattcgtctggtcgccttgacccgccctcgtgtcgtctccggtcgggacgcgggagctgagcgggcggcaggcaagccaagcggctggggccttttcggcaaagccgcgccactttttaccgctcgtgactggaagagaggccgcacgccacggacgccaccgcgccgcgtagacggttgggaaaaccacggcgagatcaccatgccccgcccgcggtgggttggcacttcggcacggcggtctctcggaacgggagtgagtggcagggacgtgcgcggcgcggcgcgggacgtggccgcgagcggtggcagccggaacggggaatacggggtgtgtgtctgggtgatgctgtcgcgcggtcgcgggcgcgacatcatgatggatcgctggcgacttcggctgccgggggccgccaccgccacctcccgcgtctgcgtctccaccggtttcgggccccggcgcggcatcattgggcaactctgcatctcgggggagagcggggtgacggctacccaaggaaggagccaaatagatatgggactccacgtgctgcaaaaaccaccatgattgactgccatactactattccaaagttcatagtatttccatgccaaaacagtggaacactccgcatacatatttgacagttacctccgcgtgagagatcagagagttaagcataaagaaagaaaaagatagagttaagcacagatcttaaaatcaaatggataaaagtacgtaattttgaggcacacaacttatacggatagatatgttgtgaaaacctaaaactattgtaggaaaaagaaatgaacgtttaagatttgtgcatgtcatcgtgagtttatttttacttataatgatatggataaatttgagacgtctatttttatatcctataataatacctaggttttcaatatggtttctactgcatattttagcttatgctcatacaaactcagtttcattgaagtgtacgaatcagtcatggctgtgaggcccgtgacacgagtgaaaggcccgtgaggccgtgaagccacgcgcgagccgaagtgggcagcccacgtagggaggaggcccaaggctcaagcccgcgccaacgttgcggccgagcgggcgagcgggcgagccgcgagcgccgccgaggccgagccgagtgagaccacgccgccccgtcccccctcccaccccctctctcctctcctctccaaccacgccgcgattcccccatttttacctcactacctccgcccccgaaaatcccaacaattttttgatccttcgccgccggcaagcgccgcggagggttccccccaggtaagccacgcgctgtcgcctccgctcgatcgccccgcctcctgtccccgccgctcgccgcgggcgtcgctccggctcagatcgaccagatctcgatcccgtttctagggggtttggctcacgttactgttcgtgcagggagtggagaggagaggagcgggcgggttggtgttgggaagggagggatggggttggaggaggacacgccggtgacgaagacggtgaaggccgcggcgacggggctggccgcggggaccatctggggcacggtcgtcgcgacatggcacgacgtgccccgggtcgagcgccacgtcgcgctcccggggctcatccggacgctcaagatgtgcggcagctacggggccacgttcgccgccgtcgggggcctctacatcggcgtcgagcagctcgtgctgagccagcgcaagaagaacgactacgtcaacggggccgtcggcgccttcgtcgccggcgccaccatattcggctacaaaggttagctgatgctgctcgccctgttcaacacattcacgtttgcattcattcacacttgctagtgtctgtgttctgtgtgttttcaggcggattaaaccctaactggtagctagattatttacattatggacttttctacttagattgaaattggatgattcaataatatttacttcgtgttccatagatcatcaacactattaccttaagatataggaacccttttaccttggtcatgttaacttattgaaaaatatcgtcgcgctggttcctgtatcactaaggtctacacgtaagcgcaaaacttttaggattaaacacagtttatatgcacaatagttccatgagaatcatttccatctaggattgaacacgttcgttcaaaaatgttgactgcttgagttagctgctatactaggctgaccattttttggtgggtgtggtagagatataggttgctagtcacatgcttatgcacagaaaatatgtggacaaacatgtgactaacctaggttgtattgatcaaggaaccaccattagatacctggagcattttggattggttcatcctaaatttggatgatggcatagtttgtgctcctatatcaattggcttctggtgactacacagtaagagttattgtgtggacagatacgggtcaaacatatgttagaaatatttgacactatttttgctccctttttttaaacataagatggattctaaacaggctatgctttcaggagcatgagctaatcctcaccataaaagtacttttgtttgcctgataatcttgcattgaggttgctatgaggttaataagatatttatcttatgcaataatttcttctagatgatgctagactagatctaacagccagttaggcttatggaactcattagcatcacgagataactgttatgaaacaagttagagacaactttgaataatggcatatgtttaccattcaacccaaaaaaaaagcattttcttgtggtaaagtagacaaagctgtggtgtcatgggcttcagaatgatattatgatgtcattggctagtatcagctgacaatgtgctttagaatgatattatgatgtcattggcttgatcattttctattcggatgctctattggttgtatttttattgcaaacaaagaacctaagtaggactaatccagattttacaaacacttgatgcccaatgaaaatttttataggggattcttaacaggtgccccatgatatttttctgctgtgcgtagtatgttcttgctttgtacctgaacagctgttccatgtgtatcagttttactaaaggggtagtactcagacatctcacgaactgttaactttgtttttacctctgcatatcaatcaatggttatctacgaagccagcatgtaatgatcgtatttgtaatagtcttgtctttatttcaccaatcaattagtaattttatagttcagtatattggctagaaagactcatgtctgttaatctggaaatgcccaattggcaggaaggagcatcccttctgcgctcatagctggttcttgcctggcttttacatctgctgcgctggacgttggcggcaacactaccagagtggacaatggcaaagagtactatccctacacagtcgagaataagcccgctcattgactgaagttctgtacgtgtagcccaagtcctgcaaaaccgtcagctcggtgaattttgaagctgatgcttactttcatgtctgttttgttgatgtactagctcctttgcaaatccttggcattgttgtgctcgagagagacctatacaacagtctcggaataaatatttttgcttgctttatcgtgatcatcgatcacaataaacgccttcacgatgcttgaaacatctggttttgcttgctttctcatgatcataaatcacaataattatttcctagcctcgaacatcatgtgatactgaaattttcatactgggatactggtcctcccgtttgaaatcagaaaatctagagtgcggtgcactttgggccaccttttagtttcacattggaccacccttaattcaatcttttcactttagattatctaactttagtttgttacactttgaaccatgccgactcttttctctagacatgtctatcctaggtggaggatttcattagcgtgccacagtcaacatcctggaggtcgttgatgtgttaaagtggaggtttgggggtgatctaaagtgaaataaacataaacttagctagtccaaagtgaaaagattgagggccagtttggtttgtgaccaatgttggccttaccaaaatttggcatgacaggtaaggccaacatgtgtttggattgaagccaaattaactaatttggctattgaaatggcctatgttatataggcatgccaaaatttggcttcaatccaaacatacacaattattgttgaggttgccaaaaaattagcaagcctaatttaggcctcaaaccaaactggccctgaactagctcgtttgggaagcttctcatagctacagcttctcccagaatcaaaagcttctcaaatagtttagtttttcgtctagattctgataagctatagttgcataatttaaaaaatgaactagaagctagaaactagaaaaccagaagctagaaactagaaaacctagttttttagattctcggaagctagctacttcctccgtttcacaatgtgagtcattctagcatttttcatattcatattgatgttaatgaatctagatagatatatatgtctagattcattaacatcaatatgaatatgagaaatgctacaaatgacttacattatgaaacggagggaataccaactagttgctttttgtaatcctaagctatccaaacatgccctagaaatggtccaaagtgaaaaaaaaagagggcccaaagtgaaattcacccgaaaatcttaagaaagtgggacatatagacaggataaattatgcaacgaagtgatacgttcttcttccccgtgttgctcgcaggcatacctccactatagcgatctcttcatggacacgtctccgtcgccttcccacgcatcatcaccgtgccctatgctgcctgcccgacggtttgcctcaaagacttcccgtgtaaccatgctctatccaggtcggccccatcgagccacattgttatgttcgagtgttcgtggaagcgacagtagtttcttccttggctgtgatgaccatggtgaactcgagggaggaaaggcgcgtggtggcgcaccctgctcgataggtgacaaggcgctctgcatgcatattgggtgacttgagctttgtgccaggccactccatgagatcatttctctctgcatgtactacggcgttcgcctctagcgatgctaggtatcaggccataatacataggtagcacgtttgttttctagagtaccatgtctgatacttaaatatcaaatctggtaccactcaaataccacatgtaagaccaaatcagatatgttgacatcattataatatcaaccatctcgttccacccttttaaggtatgggaagtccctcaacagtcaacatctattctttgaagatggcaaaatttgttatggacacccaaaaatcatgaaagttcgagccattaatttggttttgatgattaatgacaaatccaattatgtgagactaatgtttttataagcatttctttgcccagtctcatgtggatatgaaagtggagtgtgtgagaggtgattcccggacttcatatgagttgagatagaatcattcattgatggtggacctaaatcacaaggatgaaatgtatgaagatcaagctatgtgtatcactctttctctccatatacatattgatatgttcatatataatatttccacgtgattgacatatgcatgtgagactaatgttttgtttgagtcttttctcttgtttagtctctttatattgagaacatgaagatgatgaaggtatacctttattttaatgcctatatttgacaaatgccttctattcttatataggattagctcctaatgtttccttctttttatgcatactcttgattgacacaaacattttgtatgcatacatcttgggggagcaaatcctatactttagttatgcatgtaattgatccaagttattaaatttcatttaattgagatctttacatgtgagcatatgtttgagatatgacacttgtggtgttgattgatactcatcatttatttatatccttttatacatgcgatcggttggtcaacatgtggatgttgacaaccggatcattgggactaataattttattgagttgaatgaaagaaataggtcccaaggattacaaaggtgttgatgctcaagtgatatcattacacctaacgataccaagaatgacaaagtgaagatattgaagatgtgggatacgaagtggctactatggcaagacggtgaagggtaagcgatgctcggtcgcgatggaccatgcagcggtgaagggcaagcaaggggcttggcgccgaagaaccaaatccggtggtgaaggacgagtgacggctttgtcatgatggaccatttgaagtaaccacattaatcatttgaagaatatatggtgaaacggtatggcattggcgtccctaaagacaatgaaagaaagatggaaagaaggcattcctattggtataattctcttcctatttacatttgagtttaggaatgccgtactattaagagggatgcaacgtcgatgtgtttatgtatgtctcggtgctcaaagtgacccaagcttaagagaaacccaagctttaacctatcttttgagtggctttaggcgttgtttttggttgagttgggtcgtcctctgagtgagctttccatagagtccaagatcataaaaaacggactcctgagcgaaaagttatagtcgttttactctgtgcttttcggaagttccgaaaattatcggaagttccaaaaatggttgcaaaactgagtttagcttatgtaaattttcgtaagtttcgaaaattccagtcttttgcctccaacggctagtttttgaggggctcgggtatataaactcctccacccctcctatgagtggctgctgttcttgggcaacattagatacatccaaacccaaatagctatccccatttcccatcctttgtggtgcctttttgtgagggggatttgagaagggaagagagttggattgagagattgagaagttaagagctagtgagcttcactccatactttgagcactcgagttcatagcaagcaaatcttcgattgtgtttgttactcttggggactaaggtctcctagacggctaggcgtcgccggtgagcacccaaggttgtggtgtaccacggaaagtttgtgaaggcttcgctttcgcctccgcaagagaagaaaatcaagagtgaaaccaatgagtgcatttgtgcaacctcgtgaggaaagggttgaaatagacccggcccttgtggcccctcaacagagacgtaggatccgtggatccgaacttcaggaaacaaatcaacgtgtctcctctcttggtttgctcgttcttgccatctctcatattgtgcttgagcttgtttttgcctgatctacttgcatgcttaattaatatagttggtgaccttatatcttgcttagatatcttatttgtcaccttttgattcatatacattttgtttattcgtgctacaagtccatagctagtgttttattccgttatccgctgaacctttcggttgagatcggaactttcaatcccataccaaaagttccgatttgaaccgaaagttctcatctatctaatatgctatgaagttgtggtaattttttaggaacgcctattcaacccctcccccaccccctctaggcgacatcaaggtcctttcaaatcatgatcattgatgatgcgtttagttggagggatatgatgggttggattataaagaactcgtttttcatagtgtttggcttggaacaagtggaatgatccgttaaaggaattccctctagatctggttagctccatccctcaaaagtggatcaatctaatccacttcctcttgacatgtgggccacatcctctgaaactaaaaaaaaaagatcattaacacataaatgaaaccatcccatcctaaaaaaaactaggatggacctaacacatcccacttgatccccaaaccgaacacatgctaacaaaatatgatttttgttacatggcactcaaaataaattgtactctctattatttaatgctgatagtgttcagcagcaaatgtaactatcttgttccagccctttaggtatgggataccgtccctcatcatcccttttttgaagtgacaaaatttgctactccctccgtttcacaatgtaagtcattctggcatttcccgtattcatatgtttagatttattactatcaatataaatgtgaaaaatgctataataacttatattgtgaaacggaggaagtaaaaaaaaaaacttctggtatgagatactgtacgtcatcatctcttctttgaagtggccaaatcttgatacacgacaaaaaaaaaaaacatgatctttaataaaatataatttttgctacgtgacacttaaaaaagtaactccttacttgcatgtatatattattttagtgtatatggtattcagtagcaaatgtacacaaaaacgaaattagcgtagcacattttgcctgcgtactgcatctccttgaagaaggcaaaatcgttgtactacctcttaccttcaagaagatgaaactgttattctgacacagtccaatgctggataatggtcctacaatccaaaaagcatgaagaaataggcaataccaaatcatggacattctttttctgccaactaagctaggcagtaccgaaatacgattccagcaaaaacgacataattttatgaacgaacgaacttgactcagctttctggtgtgaaggcagaatgcttagtcattttatctcatcatcagtagtctatcaatgtcacaacaattgtttcacttcattctcgtttgttattattgaactcatcctaagaaccccttcaaaaaaaacaaacaaaattactctgccaccatgctggcgtgacaattctatgtgggtaaaaaactcaaagcaccctagaattccaaaattgttggaaataaacctaccactgatgttactttctatgacttctgctttgatttctgcttcttcaactccaaggaagtccctaatcctactggtgtggaaccaccggactttttagacgatggcccgttggtattccctgcagtgccgttttgtgggggtccattcgattgctgaccttcagatgcattttgagtgctggcagtagcggaagtagcagcggcagtggctggagtgctaccagaagcagtaggcgccttcgccgagcccagatagttgagaatttgagatagattagacatgtaatcaggcgcctgcccgcttcgcacattaaggcctctggcagcagctttcttccgaacttctgcagttgcccgagcagcccgctcatcaactcctcttactcgaggaacaccttcaccaactactgcagcattaagtgatcggttgacatttgctgatccttcaccaggttgtttcgcagctgccttcagtgctctcaccaaatcaggatttgcctgtcaaatcataaggtaaaaactggatgtcaaaagaaccaaatacaaaatactgagatgtctaatagccatatacatatacttcgttaacagtgacaaggagaaacccaaaaaaaagtggcaatgtaccatcaccttcaaacgaccaagcgtgccagggattaatccatgtacagaatagcaaacaaacaatatagggacaaatattggggcaaaaagcttccataactaaaacaagagaatgtcaattcaatcatactgccagtcaattcaatcaacatcatctgatgcaacactaatgttgccagattctcaaaaggaggttttcactctgtacttcctatgacaagctaaaaaggaactacgagtctacggctatctattctcctggaattgtagggttgtatcaaaggcaaaacggtaaagacttcaagattgcagcaactaaacttaccttcaacaactcaataggattagcaggtgggttagtaccctgctgacctttttgcttctgggcattcacctgtacagcaaaatgagagttacgtcttcgatggacaatgcaaaaccggatccagcatgaagataaaggtatgcaaagcagaatggaagattttcttacacaaaggttttgcattgcattacttggtacttcctccgtttcacaatgtaagtcattttagcatttcccacattcatatttcattaacatcagtataaatgtgggaaatgctagaatgacttacattgtgaaacggagggagtatattagatgtacaagagatacaggaccaaataaaaaatagccgtatacattttcttaagaaaatacaaaactacaatactatgccatacataaaacatgttgcatgcttgttaaaagtatcacaaatccaaatacagtttaaacttatacctgctgttctcgcgacttaaatgtatttaaccaactttctgcatccttagtccttgaatcatcactccccaattgtttcaccagtatatcataggtcttcttttcatgctgccatcagaatcaatacatgagatcaatgttttcaaagtattctttttaccaatcatctttctggtgaactgacctgaattgaaagtttgaatgcacccatacaactgaatgcaatggcaagggcatgatagcagatagctgtttgaatatgatctggtcctagaagcctctcgttctttgtgagtgcttcctgaagatacctaagagcagtactcatattcccagcatcctggtacatcattgcaacatttataagagtcgctgcaacatctggatgattaggacctgatgctaaacttagcaaaagcaacgtgcgagacatgtgacgcagagcaagttcagtttgattaagcccatgatagaacaaagccatgttaccgtagctgaaaaagaaaataacacacaaggttagttaatataaaagatattaactgcacaaattgaaagaaagaaaatgatgttgtaaattaatatcacatatgacaaagatacattcattctctagttggtttaaagatttctagtagatgttgggatctaggatgggcggtcagttttgtatcaataacgtgaaatttagcttcacaacaaggacaagatcaaaattctatagaaaaattgaaattgaacaacatgcctgtgggctgtatcaggatgatctagaccaaggcatcgctcatttatgataagttctctatgttgctgcacaattgctcctggtatatcgccagcatggtacaaaaccatagcaaggtaccttcagtcaaagggaaaacaaattaaaatccaaagattttattatggatgacttatgtacataaaaacaaaaagagaaatctagaaaatgccagatgcctaaacaaataagctaatgtgttaccggcaacagtttgcggcatccttatgcatgggaccagtaatctgttaaaggtcataaataaatgtcagaaatcaaatatccacgtttttgccgtaatatagctgtgatgcatacctgttgaagtagtgaaaaagcttcagaaaatagtgcataggcctcattcaatgttccctgaaatgcaggtataaaaatttgtaaaatccacgagtacagaaaattaaacaggatactccctccagacaaaaataagtgacaagcatcttttgaacatttcaaatcaactattaaaagtgatatggttagatttgtcttcaaaatagtttcaaaacaatttagctatgatatatattttttataggttctatacaagtaaagaagtgcattggtgtacatatcactgtccaaaatgacacttatttgtcaacagaggaagcattaatcagtataagatgagtccatcaaaacatgttatcacaaatttcacgggaaaattatatctggattttctccatacatacctcagccatccggattttccctgcttccataagattccttgcatctgtacatacaggaacagaatgcttgacaactggttggagattcaggatatctgaaggctggaatggagctgcagcatcgaggtcatatttgcgagaagcaattgttattcccacctattatgcagattatgtcacaattgaccaaaagagcacataagaattatttgttggaactacttgcagccaaactattaaacatttctctgaaagagaatagcaaactcaatgaatatagagctgaacaaagcaaaccttttggcaaagattgcggagtactgcaactcttttagcaccagtcttagcatcatcggtcacttcaaactaaataaaaggagtgttatattgatggcatctatagaaaactacggaaacaaaagaagcaatagccactaccagatatttatgtttcgcaaactccttaatgttagaccaaatcccatcagatgttagatgggaaaatgttggcacaatgttctttgaagaagcagaaaggcttgatttctgtccctcggcagatttttgattttgagtcttctcatgaccctaccaatttgaaaatccaaaagaatagccattagttgcagttagaatacaagtgatgacatgagtttcttacacgtggaatagcataccttttgggtttttgtatccgtactgtcaacactaccttttgtggaaggtgccaaaacattgccaataaaacaatttaagaaatgagcaatggctggtccaatatcatgatctgcgctttgcctaagtatttcctgggatgggaacaacaaacagtacggtcaacaaattggcatagtttttccaatgacttcttattaaacgtggtaaaacaggaaagttatgcattttgatgaataatcttatccatataacatttgtttgaatggacagcaggatgagtctgggtgacagtatgactcatcctttagaaattattaaagaaataaatgcaaagaatttccatcataaaaacaaacagctggtaagatagatctatcaccttgaccacatgctttgccgacctaacaattatctcagaagacaacaaaccccgtagatgtggcaaatgcttgatcatgtcagctacctgagaaaggaattagataatgaacatactatacataaaatgcaatgaactcacatccagctggatcagttcagagactcactttgccaagatacctaacatttatcccattgctatgcagcacatcagtcaaagtctgcccatccatgggggagacatctagggagcagagatcctgaacaaactttggtatcaccgtgtctagaagatacgaaccaacctttttaaccaatgcttcatctgctgcaatctcctaagaaagcaaagagtaggctgtcaataaattagagcagggatatcaagcagggagtagttctaagactaacctctggactaccagcaagtttgtactctgtaaacacatttggattaaaaaggatttctgcagttgactcgttatgttcagctggtttagtagcagagctgtcatcagatgtgccaggtctaggaccagagtcttcatcaaacttatcaggtctaggaacagagttttcatcagatttggcaggtccttccgcagttgtagcctgaaataggtggactaagtttccagtttgcatatttgaaacaagaataaccacattttttttaaagaattttaggcatatgagtaccacaagggaaattgaacacccataaactgttaaataaaaatgggaaaatcattttgcttcatgatattggataagttagaactttagagtttagacaaacaaatcattaccatgcaactgaataagggaagatatgaaagtgagaaataaaaacgtggcaatgtgttttaggttataaaggaaaatagcatatccagtttgacttgactgtaacactaatttaggaatgaatgcttttgaacaaacacaaagtattccataataaatttctgcaccaaccgtagcatcagaagtacttaccaattgcccattagattctccaggagcatctgcaactttctgtgtagtggatttatttgtggattcagcctgcttacataaagatatgagatagttaggactgatcatataccagcgaaccatcttctttgcagaaaaagggagaccacgggatcagctcacctcaatgaatgaggctacaagttcaggcctcaacacacagaagcggtgctgtagtccaatgtagttagaatctcgaggggtcactctcatcagatccaaaatataatgcctacagttggaaaaggggaaaggatcatgttattcaataaaaggatatcaacattagcactgtagtgtgtgttcactgagtacaagtttgggcagtttgacaaaattataaaggttccaaaagaggcaccccctcccccccccccccccccaaacacacacacaaaacacctagaagaagcttatacaggatctccagcacccaaaagaaccactgagcatttagaaaaagaaaaagcacattgttgtttttagatatagattttgacctgtcatcacttccaacaattcccttgcattcaaccgtagcagctaattttacaggattaccagaaccatccaaaaccacatgctccttcacatggagtcgctttgcagcctcaaccacctaaaataatagatatcatcaagaaataaggatagtctttgaataccacaaggcacagagtacatccactgctgtataacatgatcagagtggttaatcactaccaccaagaatcaagtatggctacaaaaaaaaaatctttcttgacttgctattccaatttccataatgatcttcagtggaaattaagtgccactaagtaaggctaacatcaaaaattgcattaccgtttgatagaaaatcaaattgtgcacaagtcaggcaaaccattaaattttcatctaacaagccacatgataagcttgtgaaaaacttgacagggaaacaaaagtaaaagtatataagtatccgaagaattcaaatatcaagaatagttctttagtcaccatacttggtacaacatgcagttttagcatcaccactgataatcaaaatatatcaaacaggcacccatcatgatcattattaagcaacatcatcttaattaacataacaaccagtttatattaacttgcaaattctcgttagttgtgaactgtacgacgtctagcaacaagataacaccaccatcaactaaagaacataagttttgagagcccatatactgaagaaaattcattactcctgtacagagaatattttgcatgctaaaaggaacatattggccaacctttgaatggaatgactcattccaagatattttcttgccattatcaacggaaccatacagaagggaatcggacttgtctccttgaagaataccaggtatgatgctctacaagacaagtacagttgtacaaggcaaataaacaaaaactcagttaaacattttcaacaggacacattttatgagagagagagagagaaactaagacaaggatagagtgaaacaacaacatacaacaaaatgcaatgatcaaatttataacaacatcagcagcaaactgtatgaaatcatatatcatgctaaaagggtactaccaccatcccaaaatataagcattttttaggtgggcacgggtattaagagagtaggttgaaatgattgtatgaaggttgtgattggttgagaggaaaaaatatgtaacaaattaaatggatgatagttgtgattggttgagaagacaaaataggtaacaaattaaatggaggatggttgtgattgattgataggagagtataggtagagaaaaagcttcattttgggacaaggtactgtgctaaaaattgctacattttgggacagaggtagtataaatctaggtatctacttatcagaagaatatagaaagattattgcaattaacatgtgcaagagaaaaaaggtatccagtagaacataaaaaaaaatatagtaatcaggaaacatacctgtgctacaaccctgtgacctctgtaatcaataattgccatagcaagattatacagcccaggaatatcagattcttggtatgccttagttccttttaagtcattgttggcagaagcataggtagcctgttcactgtctgctatctgtgcctctgccgatgcatcagaagtattgtccaaaacaccattaggttcttcagtttttgaatttgttgtgccactaggatctgcatggttcttatttggcttagaccccggatctgaggagcctatcacacttctgccagatccattttgaccatttggcttctggtcctttgggagttgctcatagtcggagtcaacagcgaaactaaagaaaatattgttgtgtacatacctgaaatataataagagcataggtaagcatctctaaatgggaattaaaacatcattaaaaaacagttaagccagatgactcaaaccaaacctgatgagcaagtgcaaaagagaagttcctaacagtcacatgcaacacacacccttccgagagagaaatttcacataacactagtccaaaattccatacaaaaaccaaacaacactcacagacataagaattgtttcgctaacagttcagatagtattatatttgagcttactcacatatgaaaacattccggatcagttggatttattgggggtatacacctattaatgacaccaactgcccctttaactgcagcatcaacgaaatcacatgtcaccttataaagtgctctgccacgcaatatcctacaatagccagaaatatttattgtagatgatataaataggcaatccaagaatgcaaaggtaggtaacaacctttcttgaggattgctatgaggaaactcctggcaagactgtaattcttcattccagtctctttgcatgccaatcaattcggttccatatgacagcacaacagaatcttcagccctagctgcatcccttctatgttctgctaacacaaaaatgtggagtataaaagctatattacagcatctacacaaaaagacaaaatacatggagtaatctacaataaataatagcagtcccaaaaacaagaataattagcaaagaagatcgacgtaaagagctacggaaaataggaaggatgaaaggttcacagacaaggtcagaatcagctgaaaagaatctggcaatgattatggggtatatcaactgaagtcaacgctacaatagttgtagaagtagaaacaacataagaatagttgtgcacatcaaaccattctgcctgccggcagaaaacatgttcataactagcttaagatttgaccataccagaagcggaacacttcaaatagtcattaaaaccttagtacaaacagaaaagagaatgaaattgtgagcagggaatgtactgaataaatcacctggcacaggataagctcccaaccaagaagtcactgggagcaaggcctgaacattctcaaaaggatgggctgatgctttgcgatccaaaatttcacgaaaaccttcataagatttgcccgactattgttatagaaacttaagagtagtcatttgacataataaggaaatatttgagagcaattgaaaacctttcttgaacttggcactgattttttgtagcagaccgactagggtgctgtcctccagagcctgtttgctaggccttggatccagaatacttccattgctagagttcacataaaatgatttggagtttcctgtgatacagtacttgtttccttctaaggtcataacatcaatataaatgagatctccatgcaatctgaagaaaggatcaacgactgtgaattccatggagaatcaaaatactaagcaatagccttatatttgaccaatctttctaaggtatccaaataaatgacacaagtgcggaatatgcggtcattagagttacctcctataacttggcggaggattaaatgaagaaaaaactatgctacccacgcatttgatctctgctggtacagatggcaacaaattaatgacagcaccagtactgtcctccatgaaattcaacccatcaagctcttgattagccgttttcccagaatctcctaagtaaagaaaagacagaacatcaaaacttgcgtgtaaattagtaaactaatcagtgacatgcaaaaaattcctaataatatagaatgtcatcaataaactacacagcatagggcaaaaccaagggttgtacctgcagtatctgcagatttttcctgtgcagattcttgctgaagagcaagggatgtggaaagtgatacatgaagactagagagggatagcaattccctgacacgacggagatgtgacctaatagatctctcatcatatatcgctagaacaaaacacaaatcgttgcgtcaaattttaaaaggaacaactgaagagaatgatccaaaaaagataattttgaattgcataccagcaacaatctccaatgaacagccaccagcagttatatcagcaatctcagcaatttcattatagtcctcaagctcatgagttgagccatctttagtgtgcaataacaaatcatagcatgtgtagaagcacgtttcaggagcgtccaagagaaattgtttgacatcaatgacggagtctccagggcttagctgtaagtaatatcatgatacgaattacacagaaccagtacagactgagagacacagcacactttgtatataaaatacctgcaactcaagcttttcaccagactgtgtcttaacagaaacagggtagagatgaacctcccctgttgagataaaacggttggttggttgttagaacttaagtcactagagaacgaaatataattaataacacatctaagcacataggaagtcctcatgatcgatcaaatgagaacgggtagcccaatgtggaaacaaagagacatgctgttaataagataagtagagtattccaacaagtgtctcagttcaagaaagtttctatccaggtagagttttgtagcttatcacagctttttgaaatagttagaacaggaaagtatcagttgttgcatcttacaaatgctaaagacacttttttgcccattgcagtagatactatgtatacctatcatcattaatgcaaaaacaaagtcaacagcagcagcattaaacgtgttcttcattccacataaattgaactcagctagccttaccctacaatttttttaaaaaagaaaatgcatcgttctaaactacttaattactaaaaatgcagataccagctgtatccttgtaaaacttagtactgcacacttggtaattctctagcccgatggcctgtcagtactaaaactcagatatttctctaacacgatggtattgcacaattcatttatctctctaagaccagagctttattaaaattatgttctatattctacaaggcacagtttctgatttgaagaaacaaatacagtatcagtatatgaacacgatcgagtgggggagaccattaccttcagctggcttcttcgcggcttgtgtttccccagctgcatcgccctgctccttctcagcgccagtgtcactgccctctacgacggcaggttcactaacttcctcgatctcgggcttggcatcctcgactccatcggtcaccggcacctccggctccgccgcgacggcggcctggcttccaccctgcgccttcgccttgttcctcgcgcccttcgacttccccgccatattccctgcccaggccaaaaaataccaaacccaccaaatccaaatcaaatccaaaccccaccacagagtcggccacacaaacgactccctaataacacgggtcgcgccgctaaaccccaaccaaacacgatctggagtcgaatcaaaaaccctaaaccctcgccaaatcgaccccgaggcgggcgctccgttcggccggacgcgagccggggaggagaacggattgggggaggggaggggggagggggggcgagtgagacgaacctgccgcgcggcggcggggaagcttcggctccggtgaggggggcgaggagaggagaggcggcgcgaggcggaggggaagggagagaatgattggcctcgcgagaggggggctgcttgggtagagagcggtggcggctggacgcccgcgccttttatatgggcgagcgagccccctagccccctccccctctggccgctggtctctgcggctctgggtgaggcgctctggctattttcattattttttttcttttttttaattcgctgcgcacgtaatgcgactatgcgagtgatatttgtgagggcattggtgtgctgccttgtagaaggggattgttttttttgttttgttttttttttgggagatgtagaaggggtatttgtggtagtctacttgtggagccatcccgtgggagggattaggggggttgttagggttttgggaggggtttaggcggctctaaacccctgtcacgctaactaatgacgatcctgagtgtcgcgtggtgcagccattccattcaagacttcgtcacaaaagcaacttggggaaattaattttggcataagctatgcggaaacgcttaatatcggacgtctgacgtatcataaaaagtcagatgggcaaactactatctccctatccacttcatacatccattacatgatataatgatctttaaaatattttttctcctaaactacttatccaatcgatgatatgatcataccattatatttgttataattaaatctttacaacaagatatcacatcattacattccgatgaaagaaaaacatatatttcaatccgttaaaatttaatgtttcagacgcggtagcaatatgtttcaacacatgtttttgttatgtttcataaaaaaatttaaatgtttcgataactaaattttcttgtttcaccatatataacctaatgtttcataaatgaccgataaaaagtatgggatgtttacgtcactactctctcccgccattcgattggctttctccccacaccatgcatgtatgcatgtatttagtgatcttaaaaatactttttcttctaaactatttatccgatgagcgatttgatcatgccgttgaatttgttataattaaatctttataacaaaatatcacatgactatattctgacgaaagaaaaacatatgtttcaaacaataaaaacttaatgtttcatatgtgatagcaatattgtcagtgatatgggcccgggagtatcatgtttagagggaggaggttgtcccccaatgccacgtggccctcccccagggggagtcaggcccggggtggggtggcggccactccttcccaaagactagttggaggaggctgccccccaatgccacgtggctctccccgaggggagtcgggcccgaggtagggcggcggccactccctcccagagattggacggaggaggttgccccccaatgccacgtggccctcccccgagaggggtcgggcccgagatagggcggcggccactccctggccgagactagagggagaaggctgccccaggcgccacgtggccctcccccgaggggggatcgggcccgaggtcgagcggcgaccgccccctcccgtgactaggggtcgggctcccccgaccccctctctaggtcaccacgtacggtgggttaggtgtccgcctacaggtgtccacctacccgcatttatggcgacccgagcggtcgcgccacgccgcatttaatgcggtgtgcagtgcactcaaccggtctgtgaccggtcgaatgaccgatgggacccagtatgtcaggcgcaccatcgcgtatgtcaggcgacgtgcagcccgacatgtcccatcaaataatgatggtgagaggttcttatactcttatcccagccggagtcggtcctccctctttggtcaaagcaaggctcccgtttcccggtgtaataggagcccagaagtcttcacccattaaatggtgactgacaggggcacccctcgtgtcaggcggcaagatttgacaggccccatcatcaagacgacgtgcgcttggcttcccaagtcaagagaccagacatgcatttaatgcaaaaattataatacttctccaccggagctaggttaggttgttgggcccatgtggtaaccccttgaggtataaaaggaggtccagacctagtggtggaggggggaactttcgagcgaactcgcgcttgggtctcgcaacctcaagcactagtgttctacactcaataaaccaagcacaagagtagggtattacgcttcatagcggcccgaacctgtataaacccctttggtctcatcgtctttggggggctcgaccccctcaacatcacacggcttcactcaccgaatcctcgaatctctcccgctgcccctggccgaactcacaaaggggggcctcacggtcccctggtggaggagttcattctccaacaaatatgtttcaccatgtgttcgaattgtgtttcacaaaatatttgtatgtatcagaggctgattttttttgtttcaccatgtataacataatgttgcaccaacggtcaactgaaacatttgaccgtctgaatttttttataccaacggacgttcgatttgtagctctctcctaagctatgtgtagacttttttacaaatcgaaagtccaatgttacacataagaatgcactattatgttctaaccatgcttcttatacttcttgagtaatcgacatatgagattcacgttcatcaaatcctcaacctctagtgctagttgactgcgagcaaggatgattgattgcattggtataacaagaactattgattacgggccgtggcaatgaaggagcggccttgtggatccatgcatgtagtggttagctttcttgccttagtaaacaggcagtacgcttgatgacaacaatggcgattgtagatatagaacactaaaaatacaaggtatttgctagaggacaatttaaaaaacaagggttttctaatggatactttaacctcttgtttctttgccatgagacaccgcccttaatagtttgtcatttattgccattttggatagtcaaatgacacaaagtgcccttcgaaaagggctagctttacaatagcaatgtgaagtgggctatgtccggacaaagaagaaaacgagaaggagcatcacgggagcatcaagtgcagtgagaaagaatggacggtagtgagaaaaagtgccaactagcgaatggacgaaatgaagggaattttggttatttagcaaagtttctctcttcgaatcagtaagaaatgataaacataatactcgcgatatctaatgggaaataaccaataaactagattgtcatatgtttttttaagtgtactccaataaagaccatgtttcttttgtgtcccatatcattttttgtcttttatattttactagcaaactacccttgcattgcaatggaaagcagaaggttatgatagaaattatatgattagattgaggttcagtttttatgatggacttctatgttagctctacaggtccgatgggtgcttcagcacaatgtagtgcacaacaacatcaaataagcctaaaaaagatcagcatgtaaatggtaaaataactagaacaaatgaaagtggatgacctacattttttttatgaacggaggaaagtagcaaaccagtgtaagctctaatgaaaatggtatgaatcactcaaacaagccatttctgcctaggctcacaatttgtccttatacgattaagttcaaatcagcgtaaccttgacttgattgagttagtttgactaaaatgataaccactattgcaccgtaccacatgttattggtcttcttcttcacgtagaggatgaaaagggacagagagagagagagaggggatatggagagataaaaggtgggttgtagtaggatatagacgagaccatattgagaaaaacatgttcctgagagtagcaaacctagtggcattgtcaacttgtcgatatccaaataggacatatgctttggtcagaacgtggattccgggtctagaaccacaatgacgacatcaatacatgggaccgatggcacacctagctcctatgagtctatggcctcaccgccatcctctccttgtgcacatgcactacattgtcattaccatggttaaattacgacgttgtccactcttcttaaaggatcgccgagttacagagtccgacactaactccaccatcaacaaccttttgcaactccaagtccaattttaacctactaggactaattcgacgcctactctaacaccatgaaggctactcgatttttaactaagacatttcactcataaatagaatctccttaccttcagtccaatcgaacgttttactaagttggtccatgatcagtgatggaggactcggtagggcgagatgtggcgctcgccatacctcattgcccgctacccccagctccgggctctgggcagagacaaggcaccaccgagatagacaaagcgcagtgaagcatcatcaaacgaacgagtcatatccgcacatgcatcatttgctagcaggtgtttttgtgtaaacatggcttttaactattgaatctagaggcaaatttccccattctccacctccatcgattcccccgatctccatccccatcggcgccttggtggctgctgcaagtcttcggagcctagagggcggaggcaacgcgtcgctagcgagaaggcaggaagaaccatgttggtcgggagaagtgtggctgctaggctcctgggtgcaaccacacagagctgtggcatccacgtcgagcgatggcgcgacgacatggcatgggaggcggtgacagtggcaagctaggaggcgtgcaacatagggtggacgcagggtggagggtgcagcagcaagtcaccaagcaagcaagaagtggccatcatcagaaaatggatagatcgttgatatttatcttatcttatcaacctcgaatatattatactaatcaatctttactatttgtttcgtagattctacatatatgatatatctatctatcatcactaattcctacatgtgatgtattgctaaaagcatgtattttttttctttttattcttgttttgtgctactgctaacacaattgtccatgaaccacacctgtattttttttccgtcctccgccactgtccatgatcaaagacaatggttcaagatattgactgaaaacaagcacttctgatttcatggcttcatacatgcggacaatctccataatgaactttgtctcaccctctcatgggtttgatcataaactctttaataaagacacattcacataagatgtttatttctccaacagttttgcatgtgtgatgaggactgatgggtgtatagatcttgtgttctacatcaagagtccccattgctacaatgttctttatagtgttatagtgtgatgatttccttttgatgaggaagaggatttagaatcacaactgattctctcaatctgagaagagacttctaaagggtgtcaccgttatggatatgcacaataggatcaagtattttccggattccatctatatcctctgtgatgttatttagtgttaaagaacaaaatttcttaccttcacccaagtgaagaagcatatcttgcttggcatcaaactaaggttttgtgcttgattggttgtttcttgaagcaaagcatcttttcttcaaacttttagaagtgagatctcttgcaaaatttggtctaattagatagaggatattataaaagctctagaaagttattttgaaatggagcctcaaactatgtttccctacatgagaaaaggtaaagaaatcggtacaataagaaaataaacaagtaaaataatattggggatcaaaatagtgtccatgacactttaaaaaaaaagcgtctacggcacaaaatgatagacaagagaatctctactattctaaaaattgaagatatttttgccagtactttggtatgtcattcgtgtatgagtcgtttttaagttcattcgcttttgcaaatacatatccgtattcgagtcgggctttaagttcgttcgcttttggaaatgcaaaaggagtcgtataagaaatctttttaaaaaagactcgcatgctaacttgacatgattttctagaaaaatatatatctaagcaaattctcacaatgaatttcacggtgaacaataataagatgaaaatagccttcacccgttgcaatgcacgggtatttttttctaagttattttataggtaccatatatgaaaaagtggggacctaggtccccactactggctatctaggactctaaggattttctaaccatgccatgtgggatcgggccacgacagcgaaaggtgggaccgggaacttggtttcttgttttaaaccaggtgagtcccgagccatgtggctgcttgggcccctactatgccataaatacgatggggtgcgaaccttcaatgcttcacgtcgcgcaactgccctcgcttttaatgcgagggataccaatccatcttttgcgtatgagaggcgacatgctaactatagaactggccataattacccctagaaagttgagaacgtgggctgtcagataatgtggttgactatcatatcgcttggttgggcccaccacaacccgacacacacatctctctaaagccgataggtgggaccagtagacgtcatcagcgtccgtacccaagtcgatgcaaagggcatacgactcaagtcattagcgtccgtacctaagtcgacgcaaagggcatatgactgaggcagactcgcctcgtgagaagcaagatccaatagaggcaactaggggcctatagtggaccctacctgtcagcatatgataagactttttataagagcaactatatcatggtatccctcgcggtgcaagactctccctctcttttgacacgtgaggccgcgtttctccgcaaccaacacctaggtgtccctcaatgggcgcatcacctccctcaaccgcaacgctatacccacacctgcgcatcctgtccttccctctcacattgttgtagcatggggccaccaccatcctttcgtattcggccaaaacactatagagaaggtcttgagtttttctaagtgttcggatggtaaaataccatctaaagcggcaaaatgataaattatatttgagtagagtaatggcaaaataccattcaagtggcgaaatggtaaaatgctattcgagttggaaagtactattcaaacaagtttatgttactaagctaaataatatcttttgagtgcatttctaactagtgacaggtaaaatatcaaggactaagcaagtggaaaagagtggttgaatattctaggtggaaaagactacccgagatgaaaaatactactcgagcaataaagatgccaagagaagattccatgggaccactctcaaccactccggctagctggcaccaaaagactataatgacatcccaaatgtaccaaaatatctctaaagttgctgacatggcaagggtataattgtaaactcacaagggcccaatggggacaagattgtaatctcacatgtacggttacggactatataaaccgaccaaaagcctgtagcaagacaggacaattttagataaagaaatattattcatcaaaagacatgcattttgtgttcggactcattttctaggataggcgggaaaatgagtttttcctttatccccaatcttattcatgaccttaggtcatgacacacatgacgcgcgaggttgcccctcccctctcctacgtggtcgtgccccaattcctgctttttttcccctgcactgcctcctaggtacactttttgtctgctcttcaattgctttcatatgtataaacaaggtgttattttatcttttttttttaaggataggtgttattttatcttattcgcgtaactattttttcctcagtttgaaggaggaacatactcgaactataatcgagggacgaacgacagactttcttttcatttgtttcttccgtctagccgcgttgaggaatgagccgagaaaacgaaaacagcccaactcaagcgtatatcagtctgtacacgcctacaccagagtccagtggtcctaaatcctaatcccggattcccttcccctcttcccctcgcttcttcgtcggtcgacctgcgcacgaaccgccggcgagggcgggtgattggcgcgatccgtgcgcttgccgtcttgccggcgttggggaggggggcaggtgaggccgactgctgctggtctgcggcgtgcggctcgtcctcgtcttccgctaaaatcccccgaaaaacaacgaaccgatttctcttttgcgactgctcgtgtcagcgacgtggctgaaccgcggggggctgggagaatatttttatccaggcgcgccccccggtttgcgtttccgtctctccctctcgcggattactgctcgctcgcttcacgcatcgtccctcctgtctcgctcgctagctgtgttcccacttctccccctcgcactacttaaaaccgccgatcccccattccaatcctgtcgcgatacgacttgattcggcctctctctctccgcgcgcgcagcagcagcagccgccgatggacctccccctggtggacctcgcgccgtacctcgaccgcgccgtcgccgggggcggcgcggcgggggaggaggcggtgcgcgcgctgtgcgcgacggtgagcgccagcctgcgggacacgggggcgctgctggtgaaggacccgcgctgccccgccgccgacaacgaccgcttcctcgacgtcgtcgagcactacttcgcccgatccgccgactccaagtgcctccaggagcgccccaacctccactatcaggtaatctggtgggatcaaaggcgagggtttgggttaaatttggtccttattaggcaggatcactaaaagtaccctacttgttagaccatcttctctgcattgtgaaatcgccatgagaattcaggcacaaaacatcgtgtctgtccctattgtaatgctggctttatttccgtttcaaatgttaaggttggtgtgacacctgaaggcgtggaggtacctcgcagtcttgtcgacaaggagatgcaagacaagatcaagagtatgcctgaggagtttcagcccgccactcctaagggtccagacccgaaatggcggtatatgtggagagtgggtcctcgcccagcgaatacccgttttaaggttgagactgtttgcttgatccttttaatttggtgtggatatctgaaatgatatgcatattgtgtgtggtcgttcgctatgttctatactgacttgtgagaaacctggtttaggagctgaattcggaacctgttatccctgatggattgcctgaatggaaagagaccatggattcctggggttctaaaatgatttctgcaattgaggtagatcatgctctacatttaatttctgttttttgttgctgtattatatacaagcggccgtgtcatttcataggttgttgctgagatggctgcagttggatttggattgccaaaggatgcatttacctctttgatgaaggaggtaatgctgtaacaatctgtaatatcctgctgtaatttgttaatctactcaggatgcaagtaaacagtaccaggtcccagcattatgtttacttagctaaaaatatttctgttggttcacagaaattgagttgtttttttttttgtaattatgtaatgaacgctgcattttaatgcattattcagatccattctgcattcatcctgttgacattggtcgattatttgtgtgtttttcatagggaccacacctcctagcaccaactggaagtgaccttgagcggcatggttctgagggcactgtttttgctgggttccattatgatctcaatttcctgaccatacatggtcgaagtagatttccaggcctgaacatctggctaaggaacggcaaaaagatggaagttaaggtccctgttggctgtcttctaattcaatcagggaaacaggttagctttgccagttttactgcaagtatcttaattagttcatattcgcgcatcaatagaaggtcatatgtatgcatattggtttctgttctgatctctaaattctggttttccatgaaattgatactgttgtcaatcatagaatcaaactttgtatttgtattttgagccttttctgaaacacaaacactagaaaactgggagtgtaagctagtgaaagatggggcttatttctgacaacttggatgtgatgaaccaacacacaagcaagtaaagcatctcgccaattgaattactttatgttctttaactgcagctggaatggcttactggtggggagtgtttagctggaatgcatgaggtagtggtaaccaagagaacactagaggcaatagcattagcaagagagcaaaatagaagcttgtggagggtttcatcaaccgtaagtgctaaccactccttctcgatgtgatttacttcatgaggcacttccatcaatttaatcttacttgctctggtgaactattgacttacccatttgcctatttatgtaaatagctgtttgcacacattgcttctgatgcaacccttaagccattgggccactttgctgaagcatccgatgctcatagttatccaccaatctgtgctggcgactacgtcgaacaggaactatcagtaatcaatctgaaaggaaagaatggattctagacgttatgcagatttctcgttaaccttacaattcatatgatcagcaaacggaacaacagtccaggctgatatgtatcttcattgctggaggctcacatgctgaaactgttgggttgttccctgcacagcccgtacatgtccatgcttcaaacctcttgttaagatagattgtctctcttcaaatgtactaaactggtatcaattgtgcaaataaaatatttactctttaacttccgaacggggtgttggacgggcctcacctgtgggtgatccgttttgggatgtgttcttagtaggagggattctttgatcaaaggaatcccttctttgtaattgtaaatatttcttcttagtgaaatgaagcacaattctccagtgcatttgggaagaaaagaacttccaaatggaatatttgaatgaagataggttgtctctattgaatgtgccaaattggtattagtaatcgtgcaaataaagtatatacgtagtatcgttgaacttccaaacgaggtgtttgaaagatatgggctttgcaatccatggcaatgaatttcatacttgaaatcaaacatgaaactgttattctcctcccaacacaatcaacagtgttcgaactaagtatcgctgaaacagcaagactattcaccggccaaaattatactctatgtaagctccatcacactacaatgcactccacagtctgtatgagcacaaagccaccccatcgaagtatacatatgtacagcaaccagtgagacttgtcccttggtgttcaatttcaatcgcacattcacacccagttgttgggcaacgagaaattatggaacctgaaggatgtatcccctgccgtgtccctcccctgcaggtctcctctccgcaccggcggcggctcggtgcacgcgaacgagtcctgcctcaccagctcgacgccgaacgagtcctgccgcaccagctcgacgccatacgagccctgccgccgcagctcgcctatggcgaacgagtcctgccgtggcagctcgccgccgccgaacgagtcctgccgcacaaggccggcggcgaactccgggtacggcgccggctgaggcggcaggcggggctcgtgcgggcgagccggcgcgtcggccgacttgccttcccacatgagcaggtggagcaggatcgggcgcagggcgtgccggtgcagcgacagcttctggctgagcgagacggtgtcgaagcaccggatggcgcccgacgtggacaccatccacgggaggaccttttgcccggacaccctggagatcaccagcagcttcgacgcgcgcttcgcctcccggtagaggtcgcgcagccccgacctcgtcgacggcgccaggaagccgctgtcgtcctccatgacggacgagatgtagatgaatccctgttcgttcgcgagtgatccacacaattgatcagacacgaatcacacgagcaggatcaaggacgagttaacaagatgcaatgaatggcatgacggtaaaggtgtactacctcctcggtgcggctaatggcgaagccgagcttggtgtcgccggcctcgagggtgatctccactggcatctcaccggcggcggcggtgtaccagacgcgcaccgccttcaccacgccgatgtccacgccgtggtagtcctcgaacccgtaaaggctggcgttggcgaggttcgggaggtcggccagtgaccccgagttgaccgtcgcggaggccgtctcgccggagatctgcaccaccatgcaagatatgcatgtcacgcacaacacctactagctactaaaacatttactctaggcaagtttgatcgctgttgaggaaccttggtgaggagggcctcggtctggacgttgaggaaggagatgggcacaccggacgactgcgaggagaggatccaggcgttggcgcgggcgagggtgtcctcgacggagttgtagcgggaggcggcgcggtcgagcgccgtggggaggacgagcatggagaggaagctgctggagttagggatcgggagcgcctccctcatcttcttctcccacgggtaggccacgtagccgtcctgcagctgcgccttgctcagggcacacaccaccctcgaactcctcgaccctggacgtcaccgtaaaaaaacagaaaaaagaaaaatgccgatcaattctcaggttcagatcagaaactcaaaaagaaaaaaagaagatgctgcattctatgcagttctgcatgatctttgctcactgttttacgagcggcaataagaaatttgaagaagaaaaaaactctatggaagatgactgaggaagtaaagtcaaccagggaatctgaatcgcattggaatttagcgacaagttttttccgagtcaggggagggaagattcaattatcatcaccgccaagtggcgttctgtataaagaaatcaaaatgcagattccaaacaacgtgcaccgccgtgtctgttgcctggaagtatgcaacttgagcttagactacagcaacttggtgtttttcttatctgaaactgacgtgtttgttttacttgtggaagcagaacacccatcaaatgcaaactacccaggtttttaactcgcttaataaatatcttatcttatgatttttttttctccgagctatcttatgattttgttattgctgtagttgcgtggtttgcagtaccagtaatctgccataggctactgtggattcttccatgatagctcaaaagtgttcaaccgtgactttcgcagcttgcacacggaagaagcaattaggatcgttaaatagagtagtgttctagtaaagcctttgttcaacaaacaatcaaacaaacattgtagccatgaataacctaatggaattcgttcaaaaaacctggactaatggatggccatattattaatttgtgcaagccaagctactctagaaacttcaaatttcccagacaaaccagctgccctccaccccccaacaccaacaacaatgttatcaccagctcttgcaatcctgactctgtcatacatcaaacctaggatattctgatcatatccccagactgagcaatcacaccatgtattgcaaccacaagatggcaaatttctgattatcaatcagcattgatccaagtatatgccaatcgaaaacgataccgtgatcgatcacgccaaaaagatctcctctcgcgagagagagaacgataaagaaggtgtcacctatcaagctaccaccatctacttgttaacttgtgcacaaaagtcgtatgcagaaggcacacgagccctatcctccttctttgtctgtttttaattaaagtccaacatggcatgtaacgaaagctcagtcgcggacttttacttttcttggttggtctagagcttgcacaaaccgaaggaaagtggctgtacggacggacatggatcaaaaaattcagcgaaaaaaaaaatctaattctccgtagtagtttgcatcgtgatgaggaggaacgacatggcgtatgaacgtacctcgaatggcgatgcactcgctctccatgcggtcgacgaagccgacggcgtagtttgggtcacggatcgagcggagcacgtactggcggctgcggcccacgacggccatcatcgcgccgccgcccccgaccgcggcctcctgcggcacgatgcaggcctgcatcctcgccgtcgtggtcgtcgccgcccccgccgcgggggagggcagcagctccccgctggtggtcaccagctgctgcgcgtgcgcgggccgccgcacgcgcacctcgacggacgtgtccccgcgcttgtacgccgagtggaggagcctctgcacggcggcgcgcccgcccttgaacggcgcggcgtgcgccgcggggcccccgcgtccgccgaccccgatgaggatctcctccaccacgtcgcccgtctgcaccgtctcgctgctcccgggcccccactcctccgccctcgacccgcccgccacgcactctatcgccaccaccccctgcctcctcccgtgctccatgggcatacctctctcaacctcctcctcctcctcccaccagcaaccgcccttctatacacgcagagagagggagatctagctgtgttgacccccgcgcgagataccgccgccccgtcgccgtcgccgctcggagcagcccacgaagattcccgcgactttgccgctgcgcagcgtgtgcgagcaaaaacggaagccgatcggtgacgacggtattaaaggcgctgccgtctcctgctctctcactcggtgcgcatcgcgccgcacgatcgtcgtggcgctgcatctgagccgtccgatccgcgtcgcgggggtggttgtgaaaaggcgtgggtcacgttatcggcagcgggtggcacggggccgagccgaggcgagcgagcgagagcgagaggggcaggctctcggtggtggggtggacttggaaaaattggggaaatcgccgacttggaatgcgtcgagcgagacagcacgcgcgcgggcgtggggccgctgatagggagggatcaccgccgtccagttccggattcccgccgcttcttcggacctcgtcatctcgaaaccgtttctgaacccccgtttctctaccaaaacacaagcagacgaagtgggagtagactcgtagcttaactggttaggtttttgacgatgaaaacagtttattcggtaaactaaatatatatgctcatatttataactttaatttagtgataagtgtaatcttttaaaaatacttacaagaataaggtgtgtattcactattccgcgccttgagagcgcatgcatttataacatgtttatcaacaaaaacacaaaccgaatcttcagcagctagccgagctaattagtgaatacaatagtaccaccctattacatgataatagagataccctttcatgttcatggcatctgatatgttcatggtttgtatagtatatcccagcagctctaggaaaagtttctgttctccattgccaaccatcttctattgacttgtatattccagtttagacttgggcgatgcactttgtgttcagagattcccattcgtcaagtcctcactatcatggctgacgttctcattgggatatcgcagtattgaatctaatcttcttctcagaacagttcagaatcaaaatggttcatttacaggtccacgtggattcgttgacgtcactgccgaacagacgaaaagaaaatggttgtagcgtgctgtcatgcagtaacgtcgtctgggggcgaataggaatatacaattattaacctctctaatctgtaatcagtgagtagtgatatgaatatatggtttagggaaacggaaatcagtttgatgtcatgaaaatgaaacatgcagatagttgtaaatttgtccagtgaccacttcgtacaagctagaaaacatatccagaaacgatgtaaattgccgttcaagtttcgcatatcgatccattcactattgaccaataataatgctccgttgaacgaactaaaagtgcaccacagttgcatcaagcagaggttaagagaaatgctgctaattattgtggaggaccatgtattaattagtcttcggtattttgttgtattggagtaggtgtatgtctcgtataatcctaactttattttcagttgactgaatgaacgaatgggacatgtgatgtagccaactacggaggggtatgcaatatctagatcatttcaccccctttttccttgaacatgcaaaatcttttgacctgtatcttcttttcaagctactgtaacaaatcatttaaccattctagaaattaacttggactcttttactggaattccacatataatcgtatatcatgggctcatggcacaaggtattatgacttatcagtctgcagaagtaaatgttttctgcacttatcaaagttacaacgcggcccggcgaaaaacaaaaagttacaacgctaatctaaatcgtaatctttcacagagatctaaatattaacccgaccaaacattgtatcaaggggagtaatggtttgtcctatttagaaaacttaggattcaagaaataacttattggtagctagcctataaaaatcttaaaaagttaggtttttcatttcgtagttatagttcatttcctgtattctataactacagcttcttaaaatacaagcgtaaatctaaaccatttgtagaagattctaatcctgagagaaagccacagctgtgaaaaagtatgagaccccccttgattcaaaggaaattcataggaattttagaggatttcattcctacaggaatttttcctatatagccttttaaatcaaaggaatgaatcctataaaatcctataaaattcctatgaaatgcctattcccatgcaaattttagaggacatttttatcatgaggtagaatctcatggaaaaaaaaatcctttgagtcttttatctcttctcaaattctggtgtttttcttgcggcctaataaaacggttattcctacgttttcctgtattttacaatcatctgttttagagctcttttgaaacaaaggagcaacgaaggaaaaacagaagatgtgagttcctatggattcattcactgtagcagcctttgatttgtaggaataggtcataggaaaactgaaggaaatattccttcattgctgattctatgggagaaacacatgaaactttccatccagtctgagctcatttttcacttgctttgcgtaggctcgaggcaatcaagctcctaatctctttcttcactgcaggagaacaagcaattaatggatataatttgtgttagttattagaaatggaaagtgggccaagttcttaagtaaaaatattcttgtgtttttttataccccattcaaacacatattcatatacattttctatgattttatattcctctattttacacgtgaattcttatcatattcctctattttttttctattcatttatttttttcaatcatatgtttgaaaggggtccttaatccttaaacttgtattcatgccaaaattctaattttccctattattctgtttttttattcatgtgattcaattgggccctgaatattgtgtgaacatgttagaactagcaagtttgtttcagtggaatccaccagcccgcatggcccgttctagtacggactgtcacttgtgagttgcgaaggccaaagcccaagaagctcccgatctcaaatggcatccacctcgccggaaccctccaccgccgccgccgtcgcggagaccggctgttccgtccaaatccgtcgcctggaggcgacagaccacgagaagggattcgtggccctcctctcgcagctctccgcctgcccggacctcaccgcgtccgagttcgccgcgtgcttcgccgacctcgcggccctcggcgacgaccacgtcatcctcgtggccgaggaccccgccgccccggagagtcggatcctcgccacggggtgcctcttcgtggagcgcaagttcctgcgcggcggcgggaaggtggggcacgtggaggacgtcgtggtcgacgccgccgcgcgcggccgcgggctcgggctccgcgtcgtgcgtcgcctcgtggagatcgccaaggaggccggatgctacaaggtcatcctcgactgcacgcccgagctacgcgcgtactatgccaagtgcggattcgtggagaagggggttcagatggcaatctacttctgaattctgatccataggtatatgtaattgtgcatttcaatgtttcatcttgtcatgacattacgctgtagttattatgattaaattttggagtacttgatttcattattttgtacttgtttccgattgagagttctacttgtagaacgacaactttggtgatatgttgcgtgattagctgtgattttgccatgttacaagcatagtttcctactgacaaccaatctattggttatgtgacataattttttgcctggctttagtagatgttatgggtattcctagcccgtgttactgctgaaagagtgcaatatagggtgggtaatgaatcatagttggtacttggtactagtagtattttggtaggatcaatgatttactgtgatgactgagcccttctactacattcgtaccagatgagctaaccgtctaggcgtctaataagatgcagacccatgcttagtaacacacctagttgttttgcctacgttgatatgctataattaacacttaacactgttccaaatattaagaaaacgacaacaatgctctccacagcgtacagtaatttgctgataaatacttccatgtgtttttgctctaacaattcatccagttgactcacaatgtaaatattcaaatgcattaccctaagatttgtatatctgatgaagttcattcctttattgtctgatatttctagggtaatagcaatacttgcaaaactgcaggataattatcagttttactcctacagtagtattctttgaagacagcatgattgcattagtttatgaccattagtttcaagatactttgatcactggcatgatttgggactgatagatatagttttaggaaatcccttttattttcatgtaacagccttgggagctagctaggcaattgctgttctctactttagtctgaatcacatcttaaatttgtcagaaattttaacgtcattattttagcattccacatacgtagaaggtgattgaattccatgttatatatacacaaagggccgtgagatttttttttgttacatgctgtgaatgtctaccatacttaaatttcattttatggaatctgttggtttgccttccaagtgccattgtctgtgaaatgtagtatgcggtctatcattaccatgcattattgctaatttacaccaagttcttctggtctgttttgggaaaaaaaatgtcttaacagagttgcaataagggtcaaatctgctttctccaatgtttcattttgaacagtgctatcacaacatatacttccatgttaccctttatttattcaaatttggaaagctctgatctgttattcattttatgccctacccataatttattactcggtgtttgatctcactatctgaagtgtaactctgagatctcatagttcctcctattgtcgcaggtaagttgctgctaatgagcatagcaaaatctggtacaccacatatccgtccagaattttcttcctgccgcaaaatctggtacaccacatatccgtccagaattttcttcctgccgacggggatcatgtcttaggatgcactttgatttttttgacaacaacttgtattttttagccgggcacaacagcttgtaccattgagaactgcccttggagctatataatttatttcaaaagaagctaagctttgagaatgaaattacaataacatgttcctacttttgcttagatgagtttttcatgaagttccttcatatattctccgttaaaagtgaggcgccctaacattataggcgcgacaaggaacttggtggcccgtctcgacggttcactcaccgtcaagaaaaatagcacacgtacgcatagaaactcagcaaatcagatctctggatggcggacgcattagcatagctgaacccttaccgtcaagaaaaatagcatacgcacgaatagaactcagcaaatcagatcactggatggcggacgcattacaatagctgaaccgttacgaccttcacaacaaactatcctctcaacaaatgatgtgaaccaatgaagccgatggtagcagaaaaggatgtgagcaaattcaagcaaaaaatcaataccagcatctaacagacatttttttaagcttaagagtgatccttgttcacagcacgatagcatggagtatatatcccaaaaggttgacaaacatgtcaaaattccaagcgcttaagaaaatgcagtcttgaatcatcaacagtagataacaaaacgctaaagcaagacttccaaatttgctctcagcatagtgactggaatcatggaaatatgcactaagcgctaactgacagataacaatgaaaagtttactcctcatcctcaacaaccttggttcccaaacccttgagaccctctgcagggatctcagcaactgtgaccagagagtagagctcctccttggcgtcctcctcatcgtttctcttgcgagagattctaacacggactcgccttgggacactccggataccattggtccagatggccttgttaagcttcacgtcgatgcgtatatccgttgtgcccatggccttctgtgcaaacttcctgatctccttgatggcattcggcgccttcttcttgaaggtgctgtttatcagaaagaattatttcattataacgtttatttcaacaaatcaagacttttcaagattgcaaaacttctaaacaagaatctgcatttatctaaaaggtcaaatgtaatatgaactgtgaagttggctgctttataaagaaaatatgtgcaacaacaattagttatgcagtgctaaaaagtatgaaccacataagatgaatgaccagaattgattagcagaaccaatgacagggcaaacataacagattaacagatgaactgctataatacacactgccaataactatacataacagtgttttcataatgtaatcttgtttccaatgttttgcccaaatggaacacatgatagcatataaaggcagcacgtgtaacgatgagcaacatctatttaccgggcatgtaactgtatcaaccaccatatttagacagatacctgactatgtccggggcataatggatcaaatcattagagcaaacaatacttcaacacaaacaaatcacagtacaatgccatccaattatgaagatacgtgagaaaaaaaaatacggatttaaccagtgcgctcttacgaaatatcctgcccaaatggaacacttggtagcacaaggagaagcaacaaatgtaacgatgagcagagtccatgagccgggcatgtaactgtgtgcagccacaacaatatataaaggcagacacctgactatacccgattaaacacccaatcaaatggcaataaatagctacaaagcgaagctacggtctcgaacgcagatctacataaataggaatgtgggatcaaatacaagagaaggatccacatgaatcaaacccccctcggtcatatgattcctgctgtgctgtagctggtctaaggatatccatccaaacaaggtgtatcagccattcacgagcccacaaagtgctcgcaggcagcaaccctccgcaccagcaaagcgctagatccctaacacctcgtgaaaccaacatctagctcgtggatctactgcaagcgcaacaaagctcagggaaatggaggagagggagggagggagcgagagagtgaggcgataccatccgtggagacgcttgtggaggttgatggtgtactcgcgggtcaccacctcgtccttgcgggtgccggcgccgcgcttcttctccgacatcttcgccttgcgccgccgccgccgccgccttcgcgcttctctcctttgtctggctccgagggaggctgcggcgagaggagataaaccctagtcgcacgcgacggggtcacgcttttatagcggcgcggagttagggctccgctcgcgtactgggcctaactgtaccagaataaaaacggcccatttaactagaagaagcccgtttagatggtgatttccctttttccattttattcttatatttcgaactttgcagcttgtttctgattttgtgaaggctcgagttgagacgagctttgcttggattggtgttcagattggagagaacacaagtaactgttcattttgcagagaacacgactgaggccatgttagttcccacacaaaaactttttaccctgtcatattgaatgtttggacatatgtatggagtattaaatatagataaaaaaactaattacataaattgcgtgcaaattgcgagacggatcttttaagcctaattgcgccatgattcgataatgtcgtgctatagtaaacatttggtaataacggattaattaggcttaataaattcgtctcgcggtttacagacggattttgtaatttattttgttattagactacgtctaatacttcaaatgtgtgtaacaaaacttttcacatctagagtttcaaggccaagtttaatacttcaaatgtgtatccgtatatccgatgtgacacgccaaaacttttcaccttgaagttctagggcgtaagagcaattcagtaaacgcagcaactcctgtgcaacacaaccatccgaaattcagaattgtgacgcttagagagctggacccaaccaacagtccaacacagatatacatgcagctgcagcaccaattctcgtaggtgttattttgcaacagaggccgatgcactgaggtctacaagaatttgcagcagaggctgctcgtaggctagtagctgatgccattgggggagtacaaaaatatcagcattcataaacttcactgtttttcatcagcatttctgcagaatatgtttcggttctcaggacttcaggagtattgaaacaggttgtgctgaaaactatatacattaaaactttcaaacaaaacaaacaccagcaattttcactggattctttttgtttataaacaacaaaataattaattcttcatagatttaatgacaaacaatcatggaactaccaaacaacactggaatacagaagaaaaacaatactggaaaacagtttagatctcatatcacagttcaaacaacacataatacagtcaaatatggtgataactgatgagcaacaacacagtaacaatgaagccaagaggaagaatggtgtcttgtgagagggcttatgcctgtaccagagtaaagaaaaatgctgaagaggaacaaatgaaagctagtaattctgaactagcagtggcccatcgcctcattattccatacaaaactatgtcgggaagatgttgaaataaacatttcaagcatgtctcaaatcaagcaaaatggaacaaaactctgaagaaagctggatccgtaggataagatgtagatacctatgagcacaagatggcagcaatcctaacacatgacatgggtttcaaactgtgaatccgaacttgtattgatctatatatttccaatgtgttccctctgaaaatgttataataactaataaactaaatgttaattccccagccaatcacttataaaactcaaacatccaggtaaagaagaaactttctcagaagccaataagatagaactaactcaggcagtacagcttatcaacctagatacagtaacttgctcaggacatcaacaaagaaggctgaaacaacagtacaattattgttatcaccaaacacgttagaggtacggttattagctcacctcatttcttaactcaatcagtctcaagtggtagagcaaaaatgagtcaatgcagctacttatccatcaatagattaaacaacagaaaatgtgaccaatgcacaagattataattttcctggaatcaacatcataatagaggaggaatagtcaaatagaggagccaattagacaacaacagtcacaaagtaccaatcaacctacgcttgcaagaattgtccaagaagaaagctaatccagtatctaccagttaacacattcccacagcacccagttggttttcttatcagcaaacaaaaatgatagaacatacgaacttcagtatcctatatgtgaatcaaattgtcccctcaagaattaacacattcgtaaatccatgaaaacatcagagatcagagttaacgaattcgtcaaatcagcacaataacaactagaaatgtcatagcatatctgaatatgcttaacaagaacaggcacaaattggggttaacatggttccacggtcaagaagaaattaagtatatgtccagaagctttattccattcaggattcagctcatcatttcataaaaaaaaatggaaaactgcaagggacctggccaagaggcgaggtcccgccgcgcgcacgcagcacagatcgagcgaatccttcgatccgatcagatcaaggaaggccaagtgaggaggcgcaaaccaggccaactcagatggcggaggatgcagcaccggcggcctcggcctcgagataccggcagatccgctcgacgacctccctccccttggcgctgttctgcaggaatctctcggcgcagcgggtctcgaccttctccgcgacggcggcgagggccgagagcggtcggcaccggatcgtggtctcctgcctgaactgcgtccactcctcgggccgctccgggtgcggccggtaggtggaccgctcctcgacctcgatgaggccgcggagggagacgttgcggacgacgacgtccatggcgcggcgcggcgcgtcgacgagcgaggtctcgacgcagtggcagagcgccgcgccggacggggacgacgccgcggcggggaggaggcggcggaggatgaaggggagcggcggggagcgcaccgtgatggagcgcgcagcctgcagccgccccgcctccgggtcgacgcggcggtggagggtgtggacgtcggcgacgtgggagagcgccgtgcgcgacgccgggtcggtgaacttccgccacgccgccgccgtgacgcggtcccacgggtgccggtacacgtgctcctgcgtgtacaccaccatggctggcttcgcttggggcggcgagcagcgagggttttttctctcgatttgtttttctttcttgcggcgagggtttgagtttgctcggtgcgggcggcgaggcgaggtaggaaaagggagaaatggaaagggaagaagacggaagaagagaaaggcggttttctgtaaaccgctctctggtttggaaaggaaggcaaatccgaaccaggcggcagccgctgaacggtgtggccggcatgtgctccgtcccccgtctccctagcgtttttcccttgctccgccacgtgtccagccgcaggatcctatgttaacccgcttccggtcctggaaaacggaaagattggagaccgtgacattatgtggaaagcggattataggattacgccttcggcttgaccggaggaggagacgacttctcttgcgccgccgcacactccgcagcagagttgctctcccatggcgatctcccacctctcccgccgcctcctgagccccgccgccgagacggccaggcttctccctaagccgcatcccctcctcttcctccacccgcaccgccacttctccgctccctcgcaacccgatggcggcggcggccccgctccggtgtccccggagtcgatgaagcaccaggagatcgaggggcccacggtggagcgcgacacctcgccgctcgcggacgagacgcggagggagctcgacgcgctccgcgccgccgtgcagcggatcagcggctccctcgcgctcctcggcggggcgcacctcgccgcgggcgcgtggatcgcatcgggcgcggcgcccgtcggcgtggggtcggccgcggccgtgcagggggtggtggcgttcgcgttccccttcacggccgccctggtgctgcgccgcgccatcaagcccatcgccttcttccagaagatggaggccaacgggcggctgcaggtgctcacgctgtgcctccaggccacgaagaatgtgaacctcatgctgctccgaacgcgggtggtcgccatctcgtgcgctctcggggtgtctgtcgggtcagtagctacgatcttgatgcggtgaaactctctaggaaggatggttagtttcattgttcggataataaaagtgcactggtggtaggcatgagagtctgaactatgaaatttgggtgcttttggatgtcgatcattgctagagtaatttttttttgtgtatgcttacactatcaaggaaatcgtaatgttactgtctcgacttttacctgcaaatgtagagattactcttcctatgaccactatgttaatggaagtcaaagcaatgttacaaaataccttgcagagctaaaccgcaaaaggttttaaatgttgctaagtgcagtgactttatgttgtatcgaagtgcttctggcatcttcttatttcctgtggatttttgacaaaccagctctgtgttacttgttagcaacttagcatggttgctgtgcctgtggtgagcagtgagcttgtaaaaacattttactagataccatttgcctgctgactcgtttatggctgaactgtgttttgaaaccatcatgttttgtcaagttatcatcttgcactagacagctattggtacctagtgaggtgagaatgcatttggaaagctctttgtctgtttatgttttcagttcacagctcatttttatcagtaatttgagtctttttaggttgatttgtgagctgttgaagtttacattgagtttcacaagagatcaatatattttcaaaagtcacaagaatttatcaataaatggctttgaattgatgtgatttcgtctactgaaattctcagcattgctctatgtattgacacgtttctatttgtgtaaatttaaaatggtttgttattcaatgtccaaatgatagtaaattaatttgtttgttttctatttggacaactgtttttctataaagattagataggttctcctattttacatcttattggtcacattgtcatatctatttttgtagcttgcatactgaatctctctcctatttccaaatagcaaacagtattgggattaaatataatccaatcaccccctcactgagctgattttgtttctttgcaagatgattagtgatgtcttgattagtgatggaaatgtatgcagatactttctttatgagaccttgtaagtactgttgtaggtagaacttgaattatcaataagtttttaataagttctccctatctgcagcactaacttgaaggtagtctttagcaatgttgacatgacctaaaaggttggtttttattttaaaaggttgttgcttttaataaaccgtgagctgtataattggaactttcccactgtccagacttgccttatgaatacaatgaggtttagctttgcataatttatacaatctaaaagtttgattcttatcccttaaataaaaatatgcttttgtagcaatatattcaacaaatggtatggccatataggccttgcaaatcctgctaggggaaagtaagatatcgcagactacagtcctggatgagatttttacaggtatcctgatacctgagaagtttgataattttctgacaagatttccatgataaactagaaataatctggagtagtagttctattgatgggaaggcatcatatatactgatcatttctgtagagcaaaactgatgaaggcatggagtttatcattattaataaatatatacagtacgctgcactgtgcttaacttgtaggtttggtctaagtggcaaactggtaatgctgtatacagaatatgcgtcagacatcctctatcagctaggttagccttcctctgataaatagaattctgtagggtgcagtggaatagcctgtcactttccttttggatgtgacaaagtgtcactttccttttggatgtgacaaagattcaccggcaatattatctgctaattggtaagctcttaacagttggcctagttaaaatagctctttctgaacaagtagataaccattgccattattggtgcctttctattactataaattggcattttggctgaaaggaggatacacattgatcaccttcagcttcccagttcctaaactttcaggtctcgtttcatctttggttatgtcagactgttagcattccatgtagtacatcatctttagtttaggtatcctccttgggctgagatcaagcctatgccaccattatcattttcctcttgcacaagggtgggaaaatccttatgttattggttataatgttcttgaccttgcaaggccaaggtaccagctacatgctgggggatgggtgaccttggcacctgcctatgatgaagtgtggctctttgctttagttgtctgctcttctgtaatctgtactctgcattatttcaagatgaattgtatcctctagattaatcttctgtttccttgatgagttgcgagtttgcgacattcctgtcaagctgatacatttgtcatggttaacgagaaagaacatatatggtgtatttgtttctgaatcctgcgcatggcagcatgcttctttgtctattgttatcattgatatgacttatgaatcaattgtggtggtcattctgaatcacatgctctacactctcactaagtaacatgactcgaaagcaagttttttttttggccactaagggatacagcatcgcagagactttgtcggaaccttttttttttccgattagtttcattctttctggtgcgtgcaaataagccaatggcaaagtggactgatggtctgatgtcaatgttgtagtgagatgtttctccttgtctttggcaacagagtatcctgtgttttatttcctttccgctgctggagtagttgaatctgaattgccaatgcttatttttggccgctcagttctgtacttgtgcagatcgtgtgccccctttacaacttttgttcagagttttatttacttaggcattgtttcaggagagctagcaataatgcttagtaagatttttgtgattttcttgatctaatgaactggggcctattttgatctgtcagttcgacaaaaaaaaaaaaaaagaggaggaacatacttgtggaatttagttgtctcgggtgatattaagccaccacatatcccttatgtatgttttaacggaatttgtaagtcttttgccaactgcaaagcggactaaaattacattctgttcgaaggaactagaatgatttatattggcatgattacagcgcaatttgatgtcactggccttctgaaaatcattcccttccaggctgttccatttggtcctgcttaattgtttgtttctgagtgttatggcaataattaatctactgcgttatggaaaaactgaaaagaaatttagcagttatatatacctttcagtaatccaattactgaagtacgaaatgaactcgattttattcagatacaggcaataatacgaatgccaatacggcaatgccattgccaaattaacatgccagtcatgattgatgcgcgtctcctagaagatgaacgtcagaacgtgtgtaaccgaatgatggtgaaatcaaacgaaaatgcgtagccagtaattccaatatcttaatttaatccaaacaaatggtgaataatagtacaatatccattcccttcaaatagggtggacgaaatatgagaaatcaaagcaccgaaatcaaaccggtgcatcaaaaatacaacccattataaaaagagaagaaagaagacgaggcatcaaagttggcacaaatcaaagcacccacattatcgcgcgtgtttggatcggtttagtagccatggccatgcatccatctcctcctcttcctctcttcctcctccggctgggctcactgcaggtagtaggcgaagaacgagaccacggtggcgccgagcgccgcgccgatggccggcgcgacggccgcgggagcggcgctggtgggcgcaggagccggggcctcggcggcgaacgccacggtggcggccgaggcggcgacgacgaggacggcgcaggcgatcttcttcatctccatccccttcctctcgaggttgctccctcgcgcgcgcgcacggtctcagctggaaccgagcaggcgacggcggaaacggaggcgagaggaagaagagatggctactgctgctgctgctgctgctgcgctttgcctgaggagggagatgagccgcggggacggggacaatttatagcgggattagtggggggctaattcggggatgcgagtggccgccatgtggaggctcgcgtacgtgcctgcatgtgtgcatggtgaacgggcggcttcgcgcggtgatctctcccgtttcgtgcagccagaggcgtccacgttgtgtgtgtgctttggtttggtttacctctcatctctgaactttgaactggtcacggttgattaagttgcaggctttgcagctaacgcgcgcatgtgttgttctagaacgagattttttccacgagtcattcacttggccgagtcttcggcgaccaataacttgggcaatttgggcgtgatttgcagtgcactattcaccgtttcctttgtgttttccggcccctactcaaactaaaagcgatagcgagttcgttcgttatcaggaggtgttgcggagatttttattagattagagaaatgaagtgttaaaaggctggtaaattgcaggctgtcgaagtgtgtttgaaaattcatcggtccacttcatgtgatcctctttagtctttaggatttaaaagtgatatttacactgtagcaaaccccatgtttgaaggcttgaagctggcaaaaagatctttaacaactttgttcaacttttttttttgcgaggaacaactttgttcaacttgatgctatgataggaggaagcttggtttggcgctgtgcaagccttgcaaaatacacaaaagccagttcaagcccatggcgcatcaacggtgtcatgggacccatgaactagctatctacctagcatgcgtgccagctcgccaatcaacaatgttccatcttgatgggtccagcaacacgttctcgccaatgattttgcgattttaatctaacgtggaacaaaaatcctgtccccttgagtatctgaatcattttcttttcattcgttttgcctttttttttttgccccttggataattcagagcacaggacccagctctccgggcgcttctgatgatctgcagaagtgcagagtaacgggataaaaatcccccaaaacttttcgatccggccatccaccactttcgcgtgatcagggctccggggcacaaaccaacggcccagggtctcatcgtttggcttttttcgtaacaagccaaaacggcttattagagaataaaaatgtatttataggtaaaattttatatatgtgttctcggtgacttaaaagccaatgctgaaaaagaaactatgttgaaaatatctcaaatcaatataaaaattgtgtttgaaaattcaaacattggctttttctttgactgaataggccatcctatggaagccctaattttccaatcaacacggctagccctgtagtccatgcctccttgggttgtgttcttccccccattttcccaacgcaactatctcgttttccacgcgcacgcttttcaaaccgttaaacggtataatttatgcaaaaattttctatatctaagttattttaaaaaatcatattaatttttttaaaaaaataataataaatacttaattaatcatgcgataaaacgaacttcgttttgcgtgccagagaggaggggttcctaaccccctcctccgaacacatccttggtgggtcgggggccttgcctcgtgccaagctgcaggcatcgaatgtgaggcggctcagccaggaggagttgaggcctagggtagataagaattaataagagcatatccaacaacatctctaaatacaactttctaaatacctatttggccagtttgccaaagagttggagagtcaaatttgcatttcactccaacgatctctctattaccttctccaattttaatagtgggtcccacatgtcaatctctaccattcttcatttctcttcacgtcattccctttccccaccctcccgccggtggatgcgcaggtgatggcacagcggctgctgctgctcgaggcaagagggctcgcggcgatgcttggcggcggcaggggcggtgatgcagatggcgccgcaccgctctaggaggcccctggcccatgtggcgcctgcgtggaaccccttggccgcgccaacaacagcctccacgtcgcaggcgacgtccggcgggagcttctggaggtccgtgaacaagggttcatcctcctcgccatcaccaccgccaccggcatggcaggaattgattgggacttgcgattcgttttcctcactgtgcgtgtcgtggtttcgccttttgcggtggcgacggctctacgtgaccgtggcgcagcgacaatgacaatgactgccgcggcgaacggtggcccagacgacgatagtcgcggcggatggtggcccagacgccggcggcacgctcgtggccggcgtgtcctccggttcggccccggccgatgcgctcaagttgctgccttgctggtgggtagacagaaagagaggaaggatcagactaggagtggtggtgggacctacctttggccagtggaggaggctggctacatttggtctgtcggaggagcaatttggtcatccgaatgaagaatctgttggagctcattttttctctgtgttggtcaaatttctgttggagatgctcttattttgtctaaaaataaatggagtaacaacttagacataatcaattattacgaatatcggtatggttcgtagtatcaagttatatctaatttagttgtagattattttaacacagaaaggtaatggttgcggttattggtcgatcggcggggcacaccgccacagtcaggttgaagcagctcgatccatgcgtggcggcgagatgctgccgaccgaaacgttagggtctgtctaagaagggcgacgaatcggtatggaagagactgatttgcataaatatcggagatttaaatgcataagttaggaccgctcccgcttgtaccgaattacccgatcctaggggttctatttgcgtacgattgatagcgattcgaattagggattcgtttgcacgaattcatattcatgtggtcctctgtatgggtaatcctactggaagccgtcggatcagcacgacagtcgacagcacctgtgagtcctgtgacccttcggcggcggtggaagaatcatcaatcatccgcgaggatccctggggcggagctcgatcaacccgactctccgcccatatggtctcatgcattcatggtgccgcacggccgcgcgtgaatgaatgtaggggacaccgggacagcggccaacagctgcctcccggtcactaatcatcgtttgttcagatttgaaatcaagtctattgttaatttcgaagtgctgggagttcacagttcagtcgggaagacaggacctctcgtgagcaaactagcaaattgaggtgtaatctactaatcttgtattagttatgtactacttgctcctttccaaaatgtaagtcattctaatatttttcatattcatattaatattaatgaatctaaatagatatatatgtctagattcattaacattaatatgaatgtgggaaatgctagaatgacttacattgtgaaacggatggagtaccttcctcttaaaaatagttatttttctagtatttaaaatgagaaaaatggacatttggccacgttcaaaaaacggtttcgttggaatgccattccgaaaacgcgtttcgctaaaatgccaacatggaacgcctgaccacaaccactttgccattttctcctttttggtcattttcaattccattttttttgctggaatgcagcttgatgagaccaaattgccgctcaccggctgaaaggggatcgacatgagcggcgacttgctcgcggcggagctcctcatcgaggcgagagcgtcaagaaccacgcagcgtctagccccctgagcaggacttccacctcggcggtggaggtgaacacaacggtgtcgagcgcggcggcgtccggggaggccaccaacgcctccgtgtagcgcggccctgcccagcacgtgacgtatgccggcgcgcgcacggtgatccacccagtcgcctctagcccagcaaggaatccggcacgagcggcggctcgcgtaggccgatgatgtccgagataaggcagagtacgcatgcgcctgctggacgcgctccccagcgcctccatgaggctggccgtggtggggacgaggaccgacacgctcccggtcgcgtctccgtagaggctggagaggaacgcggcgtcaaggaggtccagactcttgaaaacgcggtgccggagcacctactcctgctcgtcgaggacatggacgatgtcaagaggttggacgacatggagcaagacctgctcctgcgcattgaggacggcgtggtcgccgccgccgccggcgacgaggcctgggtggatgacctagaggaaaggaccgctggtctcggtgagcagggggcaatttggtctcatcaagccatattccaacgaaaatggaattgaaaatgacaaaaatggagaaaataacaaagtggctgtgatcacgcgctccatattggcattttagcgaaacgtgttttcgggatggcattccatcgaaaccatttttggaacgtgaccaaatgcccattttctcatttaaagtgtctctcaaaatacttatcactcatctatcaccttccattcaaatccctctccccccaataaataaataaataaataaatagtggatttactcctccctctttccccaaatatgtgcaactcctaaatggtagcttgcatcgatgtcgattttatgcgacaccaatccattccttgccaaaaatccaatcacccatgggatccaaggccgcctcttgttaaataccacgatgtagaacacttgatttttcgttgtttttgctcgccaaagttgttgtttggccgatgtcatggaaaacaactacatctatctcctctcctctcttttccacgtcaacgattttgttttgctggtaactgagagatagcaaatagaaacctttgtatgtgtccttgtaccctcctaacaatatactatcattagtattatagtttttttttaaaaaaaacttaatatatgctaaagtatttagaatgagtagtatagccggaagaaattttatgacagaaaacctaacttctgttagataataataacttgcccgtcagatttgcctccctatcactattgttcacacaatcacactgaagtaggagtaggacgtgactccggctcgggcgcatgatgggaggaggttaaaatcggtgctaacgtcattatccgatttacgtgtaaaactattttaaattgatttttctcttaaattacttatccaaatcatgatccgattacaccattaaatttgttgcaattaaatcttcaaaataagactacacatggatatattccgatgaaaaaaattagcttattattgaattatttttaaatattgcacgatattccaccaggtatatcggaattgtttcactaagtagatcgaaaatgtttcacttgcttaaatcgggtattgtttcaccttatataaaacaatgtttcagcaaatagctaaagaatgtttcagttcactgcaacatttgatccatatatagtgaaacattataagtacactaggtgaaacattttttggtggaacaaaaaatgaaacgaattctcttaatagggagtttccaaaatatgtgagttttttttttgttgcaatagaatattttagtttactgcaatattagatttatacatagagaaatattgtgagtacactaggtgaaacattttttgtggaacaaaaaataaaccaaattatcttaatagagggtttccaaaatatatgggtgatttgttaaaaaataatattttaattcattgcaacattagatctatatatagtgaaacattataagtacactaccagaaataatatttttcgtgtaacaagggcagtaccagaaactcgtgtattgtcctggttattcgcactgtcgtcttgctggtttggtgtgtatttgtacgaatcaactacttttcaagctaacttgcaatggcgacaagttatctgtaattctgtagacgatcttaactgtttacctcggctgaagtcttgtgctaccgacaagtgtacgcaaaaatcaacgacccatccatcgacgctggcgatcacggcaaaacgagggacagaacagattcagaatgtcttaagtccaattactaactcctgatctaccggccggcttggcgatgatatgcatatatacccgagtgataaaaatcccctaaagatcgttccagtattgtcgatcgagacatgccatcgtgttacaagatcgaatcgatggagcgcatccacggccacaagctgagaatcgcgagccgactactgagacggacgtgctctctacctgcagctgagccctccctttcgccctggcaacttccgccgtgcgaccgatcgatcgattcgacgacggcgccgaccggcttccgccgcacgttcagttcagacacttcgagtttttttttcttttttgcggctcttgcattattcagacccagttcagaaaactcagcacgaaactgaatggacttttaggtgtaccaacacttttttttttatcttctctttgtagccaatgtagcgtacagctcttgcgaaggaaggaccgatgaaatggatgcaggtgctaggcacatttcacggtcacaacctcacacgtccggtcgatcgcctcctgtctctatcgcgaaaaaaatacgtgacatcttctgcgggacaggggcgcatgtaccgtgattgaccccaacacacactacgctacgttttttactagtcggctcggctgctcgttggaacgttcgttgcggacgcacgcgctacgagccaacgagaggaatcgtggcagtaaagcgtcagcgtacgcatccgcgcgcgacgactttggaggtagacaccgtgcgatcgatcgatcgatcgatacggcaggtggccctgtgcatcgcccgtagccgggcttgtacgtctccctacacatcatgtgcacagcttttaatttttttttgtgtgcgtcatggtgtggtgtgtgtcactgcgtggcgcacgaacgtacgtgtacatgtacgacaacgacccttgacccccgagcaaaaaagcgtgggagacacgcctcgtactcgacgttaaattaccattctactgctagtcatcgcaaattacaagtggtatatagtactacaaacgtatcgttcgtcgactagtattgctgtaaattttagccgggattaatacgtgtttgtgcttggcgtagcatggcggctgatgaatggtatggtgtcggttttagccggggtcgtcgagtcgtgcaggggactcgttgcggttggggcctcgccaatcagagggcctccggtcggttgggttgtgggcgtcagtcgtcagacccgacgagtggtggggtggggagtcgcgtgcccgcgccgagaccgcctcgcgtcgcgccacctgcgccaccctcgagcccaacgtgtcgcggagaggcccaccacgcgtcgcgcctacggcgccaagcgccccgcgcgcccggggcggcagcctccgatcgcgtcatcgcgcgccacctcgatatataccccactacccatgccgctaccgtttcaccgctctctctatctctctctctctccctgccaggtgcttctgcgtcgcttgccgtgctcggtcattcctgcgatggcatctagaggcgccgtgttggtcgccgtggccgcggcggtggccgtgatgttcgcgtcggtggcgtcggcgcaggtggacgggggcgtgccaccggcgccggcgccggtcacgggcgcggccgcggggggcgcggcgtcggcggcgctggccgtggcgtgctctgccgtgctgtccatcctcgtcgcgggtgggatcatgcactaggcaggcgcgcgaggtggtgatggatggaattggttcgttgatgatctccgatttggacacggctcgtttcgagtcgtttccggctatagagtagtactagtagcagtggttgggttgggtgcgtttccgagtgaggcatgttgtgtttatttcttattcatttgtatcatacattggtctgtgtgtgtttgtatctctcttgttgctgtggattctatgaataaagatggatgatgtgtcttcgtctcattcgtcactaatttcctctatctctgttcatttacatttcagatctttcctgcaacatcgaccctgttctcttttatgattttgtacaactatgcaatgggtcaattttgtacgctaatcaattttctctatactactctgcacacagcacagtcgtccacctcccatcgcccgccggcacttaaaaaaccagcgaaccgggaaaagaagttttggcccctttcacctcgtcattgtgcaacttcgagcacgattaacctgggcgaagcttcagtgttaatctgaccttttcagcgcacaccgaaggctcttgtagcccaggatttagtgatcgttcttgtcaattgtcataactgcaagcctgcaataaccttatagggcccggtttctgcgtggggcgtttttcggtgggcttggatgtgtgctactccctccggttgataacgaaacggccttaaaagaacaactgtaactttttattttctactacagtataaatataaaaaatcaatagcctttattttctactatagtataaataaaaataacaatagatatatgattttatggatgttgaagtacttcttaaaactaatttatacaaaactaattttacgtatggtcttcgtattttagaaacaaaagttataaagtttgattattttattttcaaaacataaggccttgtttggtttggagggggttaaagcggattggaggggtttgagggggagtaattccacaccataataggtgtgaaataaatcccttttaatctttctctcgggactaaccgaacatagtctaaagtattactactatatgactagagggagcatatatactgcaagacgagagagttgcgaacggttatactaaccttgtattatgagtaatatgtttgtatttggtcttaggtactactccctccgtcccacaatataagggattttgaatttttacttgcaacgtttgaccactcgtcttattcaaattttttttgcaaatataaaaaacgaaaagttgtgcttaaagtactgtggataataaagtaagtcacaaataaaataaataataatttcaaaattttttgaataagacgagtgatcaaacgttgcaagcaaaaattcaaaatcccttatattatgggacggagggagtactccacaaggcaagagagttgcgagttactctctccatccaaaaaaaacttacatcccttaataggttaagttttttttttgggacggaggaagtacatcatgatgacaaggttgtaagtactgatgtataagggctaattaaaggattctatgcatgaatttcatagcattaaaatcatataggacttttttttatgtgcctatttgattcactgattgaaacttttcagatactatagaatttatatggaatggttcattttatatattttttgaagaaaacttagtaagagctctaatcttgtgggaaatttttagattcatgtgtttttctacggttcaattaaacattcattcatgtgtttttttaatattttgcaatcatttattttacatttatattcatgtcagaattttgtgttttgttatatttatccctatttttttaatattgcggctcaaaatattcctttgtatgactagatgtttgcagtgaaagcagatgtagaaccgtagaagtttattttattgttaaaatcaaccgttacagaatttataaagagaagagggtgctcattgcacactagtgaaatggatttaatcacctctcatatcttgtctccaaattaatcttgttgaacgcgtacaactcagaagacacgcacacacgcccacttgacccaaattagttcccagttattcctcctctgcataatactcattatgacgatcatccggcttaacaggaggttgcttttgcagattgcaatgttacaaagacaagcgaaatagtaaaaaccactgctaaaatgaagttacaaggaccttggtgtgcctgtatagagtaaaaaaggaccctgatatggatttgtttcagatgcaatctgcgaaggacatgcggatacagttaaaagtttttaatgaagtttctaataactcgcttgaaaaaggaaaggttcaatacaaacagaacgttatctccgcgatacaatctacggcagcaggtaggagacgggtggaaatcaagcgagagatcgaaatcatgaaaacagttgacgaaaaggaataagttcaccggaggtccctcaacttaacaataagatttttttggatccattaaccacaaaaaaccattcactcaaagtccctaggcagtatacatgggtggtttcgctgacgtggcatcctagtcagcaaaaataattaatattaatatgtggggcctacatgtaagtgagacaatggtgtgggtcccacatttctcttttttttttttcctttttctcttatcttctctccgggttctctcgagcgggcgcggcgacatagggggagagagaggtggccagcggcggagcggggacgacggcagcgggagagggagagagaggcggtccgcgatggcggcgggagaggaggagaggtggcggtcgacacgatggcgagctcggcggcggagatgttcgaacgcgccgggtgctcgacctcgggccccgccgccggcgagcggcgcactctccctgtcgaccctctctccctcccttgcctactcgtcctacactgccatcctctccgcgcactcttgccacggccgcccctgggaggccctctccctcttctccaccttcacgggcgcccgccccgacgtcgcctcttttctctcctctcctctcctctcttcttcttcagtgagggaggccggcggccggcgcgcggagcggtggcgggcccgcggcgggcgagtgcgccggggcggtgaggagaatggcggagaaggcgagtgaggcggacggcgaccttgctcctgttcccgtgcgtcatcggcgtcgcctttgtccttcgtagcgatttccccgacggatgcgggtggcagatgcgggcgcggcggtgcgtggggaagaagcgggagagggggccggtgcggcggcgggcggcgtggagagggggagaggaggcgggcggcatggagagggggaaaggaggcgggcacggtggcaggcgcccgggacggcgggagcagtgagcgggcggagggcggcgcctctccgcccgccgccgctccgcccgcatcctgccgccgcttcgcggccacacgggcccgccgccacccatcgccgcgctcgcctgccaccctcccatcgccgctccgcttgccaaccgtcggcctccctcacggaagaagagaagagaagagaagagaaaggaggaggaggaggagaagaaaagagaagggaaggaatgtgcagctgacatgtgggccccacgtactttttttattattttttttgctgactaggatgtcatgtgggccccacatactgcctagggaccttaagtgaatggttccgtatagtttaggggtggagaatttctagttttgtggttaagggacgtcaaataaatctcgatgttaagttgagggacttccggtgaacttattcctaacaaaaatatccaattttgttgggccaaattgggataggccggaatccaatccttcagacgtgaaagattgcagctcatctaaataaggcccatccttcctagtcatcgcggctaacgtttcatgcaaataatgtcttccttcatcctgtaatcacatttgcttgtgttgggagacttggagccggagggcgacggtcgctgaatattatttgggcatcagaataatttagggatcatgcatgggacaggtaaaactcaacaacaaagttcaacctgtatggtgttacgatttttctaaatctatgacaagcatgacgtccagtctatactttattgaatagaaataacttatctagattaagagctgtgatgccattagtcatggaaaacctacaacttgtctggccaaagatcataagagagcctattctatatcatcgagtttactctaattcaatgatttgtcatcgattttgcctctctctattatataccatgactctgtcagttttttctacaatatgcattgggggtgaatacttaaaaaaaaacttcaaatatccttcaaatcatagaagggttgacaatttataaacccactataagttccaaaaaatgcgaaagtttttacatagcctttttatacaatatatgtaggaaccaaagatagatgcatatgaaaaataattgtgtattgcatagcacgtgaaagatggtttacataaaagaacatcaacaaaagatacttatattagcataaaacataaacaatattttcgaaaaatgtcagtgtaaattgaaaaccttgaaatgtgcaacacacttctatattttattagaaaggcatgtgaaagctttcatattttatcgatcttctagtcgatcaatcaactatcaacccttctacatctcgaagggcatttagggcctgtttggcagggctcagctcccagattcaacttacctggagctggagtccaaccaaacggtccaaatatgttcaaagctggagcggagcgcatggaatcgctctgagaaattgaactggcgggttggagcggcattttggtcgctcctgaactccaactccaaccgcgttatagaattgcccatatattttcgatgaaattacccgcaaatgccatcgccctaccccccatccctctctcccgtaccgcttcaccccgtcttccccgacctccagctcgcgggagcgaggaggcgaagcagcagacggcgcacggtggaggaggaagcggccggcggtaacgacgcaccggctggaaatagccggcgcatgggcttcccctttcactgtcgctcccctccttcccatcccggcgcacaacggctgagggcgagcacggcggcgcatggcggctaatggggaacacgggggcgcacggtggctgagggcaagcacggtagcacaaggtggatggagacggcgcacgacgaccccaaatagcggcacggtattttctcccaaaccctagaaatttccctcacctcttcccttcagatttggttgagtagttgttatcatgcaatgagcaaatggggaagtttcagatctgaagacttgtctagtgatgaatggtaaaaatgcaatgagcgattgggatgtgtgaaatttcagagcagtgatgaactatatagtaactttttttttgtttagtgttgtaccttgtgtttacaattatatacacacttggttggaattgagcaaatcagcaaatggttatatacacacttggtttataattctttagtataaaacctagcagtggaaagaatgtccttttataggaggataattggattgggggcatacccctggctgagcaattgggagaaaaagaatagggaattcactatgaaatctttctatgatgccatgagaatacatggactgagggcctgtttagatccatttggaatggcaatttgcaaaagttttgatgacaaaagttttggcattgcaaaagtactagttggtgtttagatgcatgttaaagttttgccatttctagcactaaagtgagagagagaaagagagagggagtggtcccaaagcactttttggcacaatttgctactatggactagcaaatgctaaatgccaaattgccaacttttgctactagtgtttagatccaaattggcaaaaagtgctacaaaatggcaaaacttttgccattttgaaggatctaaacagggcctgaacttcccacacaaaagaatctagaggccctaaggcacccctgaaagtggaagtgtccatgtggctattaaaaacacagcatactaacaaaagatggtccaaaaaatggggttggaggaaaggaagctatgactttcaattctgtgatagatttgaagctatacaatatctttttatagattgtccttaattgattcatggggtgttttgctgacctcaatggaaagacaagtcacaagtgagattttcaaatcaagatttggttagagggcacccctacgaaggattcaagattgaactaccagaagtccctttttttttgccgtcatcactgttgtccttgctttcacttgttagtttttcagatatgtgataccgagatgtttcgcaaaggttcagttggatgtaaagtagcagcacaaaacttcagtgggttatgagatgtcggtatgactgagagactaatactattgttggtttttttgcttggagctgacctggacccttgcttgcaagcaaggccttgaacttattcatcgatggatgcattttaccttgtatacgcagcacggcgacagcggcggggtcagagcacggcaacgacggtggtgtgcaaggtttccagatctgtgtggaaggtatctgcactgcaacgacaggttatagcatttcattttgcaggttagcagctggtgaactgcaatctatcaagatttcacgcctgccttcagttttatctgttagctaatgacagctagtgcacctttgtgttttttctgctctgtgtattctgctggtttgtgaatagattactatgaatctcttggaaagtcattgaaaattgtctggacctttattgaaaattgtctgaacctttatcaaaaattgttgtaaattcagttcatcagtcatgttttccaagtgattatctgtgttgtgattctgcatgtggcagctgcacatattgcgatttggtttgatatcttgcaagagagaggccaatactttcaggatgagataacataaagcattcatgatgatctagctggtcatactgcacgatgatagaccatattactatatgttattttgtggtcttttgctctatcttttgatgataatgatgctacaagttgttaaacatttatattactaaggaaaaacagcatattaatccttcatgaagtaaacggcaagaatcacaagggtggtattgtccatctcctccctatcctctctttcagaattttaggagctgaccaaatgaggcaaacacttttacatcatcttcggctcttacaagaggtagctccagctggagttagagtttggagttaggatctgagagttggagctttaccaaacatgcccttaataaattgtttagaagtatcgacccaatgacatcttattaaaaaaatagcaaagttagtggtatattataaagggagataaagtcggcggtaatttgttaagacagagttaactcagtggcacgaaattaaattattttgaagaccattctcaacttatacatccattcaattactactcaatccattttccaatctcccgatggatcatcaaagttgatgttctcaacctagcattagccaacacttgattatcatataacaatcaccgttcatgcacatgttaattgccctttgaatcgaagaatggacggccggaactcgaaatcgaaagaaaattattcctccttccgtgcataaacaaactagcattattgggcaacaaatcgcaacagcctagctgaccatccagaaaggcgacccgcacattgcaaccaacttgcacgttccgcaccgcaccatcccatgttccgtgtccaccattcacaccctcgctccaacgcccccaagccccttcgcgtagcgctcgccgatctgaccgatccacgcatgcaacgcacggtggcatgttcacaaacgaggcgcgcccatccgccgtgcagccaccaacacgccacacgctgatacgcatggccgagaaaactaacgcaccaaacaagcccacgacgcgtcagcggctcaccgcccgggtgagcccacccggcgccgttcggtgcgcgtctccacgcagcggatcgggaggatatcgcggggaacccggcatggaacgaaccagccactccaccaccagcccaccacccacatggccccacccccgcggccccgcgcgcgggcgcagccaagccgccgatccaccaaccccgacccgcaccgacggcccagatcgcttacccacgccgctgcacgcgtacgcgagggttggagccgcaaaattccagcgtggaatagcagcacggcatttcctccctctctctctctccacgggaggcggagataaaaaggcacgcagccgctccaagaaaccctcgcccccacgacgctcgctctctcctctctctccctcttccgccgccgcgcttggggaaggaaggagaaagcaagccatcggcccccgcctccgcctccgaagggtgagctgctcccgtcgtttgcctctcctcctccctcctctcctccttttttgggttgtgctcggtggagacggtgatgtatatatagatccgtggatctggctgtggctcgcgcagatctgcttgtttcttccaagtagacttgttacgcctgttggtgttcgagtggtaggagcccttgggcttttccaggttcagatcgacgcctccttcctctggtatgggaggatctcctgttcatctgttgactgggtggtcggttgcttagatctgttctatttctgctttattttgtgcatgtattgtgtggtttgtagggttatggctcccctgtgcgcggatcatgtgggtttgggtttcgtttcgttcgtagaatctttggatgttcgggttggctccgaatctgtagatcggaaggtcattggtcaggtggggatggtggggcagccaaaagggttgcgtttttttactggttttctttattttcactgacgtcgactagatctggtcgtctcatgtgcctcagatgcgtgatctgaacgcacacaacccctccaaacatgactctgtttctcgatttgatctgaccgtgaccgtattacagtaacgatccatccttgtttataaacttgtacagatttactagtataatcctgtgtttcatgcatgctagttttatacttctcattacctgttggtagaatttaataatgtgctctggaattgcgattccttttgctctgcacaaaaaggaacggccctgcttggacagggaccatccttttctgcgacctatttaaagttctcatggtgcgtcgtgatggtgatgtgcactactgtgtagaacaccttatactgtttgtcatcaggagttccactgcaatttttaatacattctggatgcatttttgtagagactgtacaattgtgtaattacatgcttatatatagttttttgggcttttgttcttggtaaatatcagtttattagctctttccgtttagtttcttaagcactacctctgtttgtacaccatgatttcttctaatgaatgaaatatctcaacaataaatctttcttctgcactgtctgttcgtatgctatgatttcttttgagtgaaatatctgaactacaaatattttgagtgaaatattttgcctgtgatcctggatttctaaaccagtactgttgccttttatgatgcaggacattgttgctagttggtgatggctgagcaggctaatcaaccgactgtccttcagaagttcggtggccagttccaccttggctccagcttttctgaaggtgtacgggctcgcaacatctgcccatctgtctcatcctatgacaggcgctttaccacaaggagctacatgacccagggccttgtcaatggtggcatcaacgtcccaatgatgtcgtcctctccaatttttgctaatgctccagctgagaaaggtggcaaaaacttcatgattgatttcctcatgggtggagtgtcagccgcagtttcaaagactgctgctgctccgattgagcgtgtgaagctgcttatccagaaccaggatgaaatgatcaaggctggtaggctctcagagccatacaagggtattggggactgcttcggacgcactatcaaggatgagggttttgcttcattgtggagaggaaacactgccaatgtgatccgttacttccccacccaggtaacctgcaattttcatgatggtagccaaatttatgttttgtatattacactttggaacatctatgtaaaacacctgaacaaagcactacgttttgatgttcagtagcctgtgtagtgattctatttaccttacatgtttatcacttattaagaagtttgaatcaatcaaaatttattaagaaagaagagttcaggtgtgtttacattctgtttgctttgttgctattgcactatagttcttttcttattctgatgacttttgattttgtctcctaggctttgaactttgctttcaaggattacttcaagaggctgttcaacttcaagaaagacaaggatggttactggaagtggtttggtggcaaccttgcctctggtggtgctgctggtgcttcatctctgttttttgtgtactcccttgactatgctaggacaaggttggccaatgatgcgaaggctgccaagggaggaggtgaaaggcagttcaatggccttgtggatgtttaccgcaagactctcaagtcagatggcattgctgggttgtaccgtggatttaacatctcatgtgttggaatcattgtctaccgtggtctgtactttggaatgtatgattctctgaagccagttgtactcactgggtctctccaggtttgttcttatttctgtctcaatattagttgttttttgcccatctatggaactattctttaacatcttcattggtttgcaggacaatttctttgcaagctttgcccttgggtggctgatcaccaacggtgcaggtcttgcctcttaccccattgataccgtccgcagaaggatgatgatgacctctggagaggctgtcaagtacaagagctccatggatgctttctcccagatcctgaagaacgagggtgccaagtcactgttcaagggtgctggtgccaacatcctacgtgccattgctggtgctggtgtgctctcaggctatgaccagctgcagatcctcttctttggaaagaagtacggctcgggcggtgcctaaactggcagaaaatgatgacgaacaagtgtttattcctggtcctgcactaacgggatctggtgaattttgcctttttaacattgaaaacaataataattcttgtaggggagaacactccccgacattcgttttttggtggaagcgtttatctccaaacattgtcataggcggaggcgttaatcgcaaacagtttaccatcatagggttgagtttgagttgagtctggccggctctgttatgtctggcgattttcctaccatacattaccctcggtgaaatatcgaaagattattgagttgctgtcttttgttggtgttactattttgcaatgcttcattatttctactgtttcatcctgttatattcctgatagcattttgcattgcgtttctctacatgcatgcaatttattgctctatgaatttcacatactatacaggagcatttcatgtttgtctctgttcatgtgaaactttttgtctgttaatgtgaagtacgaagattcatttgcgtgattgaattccatcttcatgaatagattgaattacatctaggtgccagttgagctgaactgccgagaacgtatataccgatccgaacataggcaagatgcagaggacacactagctctctttccaccgctgcagcgtctaagataccctttccactgcacctcctgacgaaggctcccacgcaccgcggcgcgttcggccttgttctttttgcatctggtccatggttttttggggtgtgcacagtagaccagattcgttagggaacctccatttcattcaacaaattcctgttcttgtcttttgttctaattatgctagtaaatgttttgttatttaattaattgtgtggtagatatttttttaccttcttggcaacaactttgttccacatttgcagttgcaatagtgtaacaatgttttttttttctgaactggaatccaagatgattttgtgctgaggtgccgctcattgactatagtggttgttactaacgaagttcaatccagcacccctgaatatcaggtccatcaaactaaattaccagtcgtatttcagcaactgaatcattgaactctatttctgtccttggctgtttttgagatttcacataatatacttccatgcactaaattgctgcttgaggtcacataaaatttatgaattgcaggaacatataatttttttgttaatttcttatgtattcaaggttcaataaaaatataataagatgaattttgaaatctgtcaaacatattccaatattccattcctgcaggaacaagatgttagttatgttgatgcggactggggtcttcatagacaactctatacctcactctactttagttatcgaaggacagttcgcagtcagattcttctttcacagcagagcttatggctctcatctttggacatgttatatgcagcactttgcaacttgcaattgaacaatgccatttacttgtcagattacactactgttgtcaaggttttgcaggagaggaaggatatcatgcaagcaatcgaggacactggagcctccggccactctaccattttcagcaagttttgcagggacaggagtccaaattaggtggataccgtgatcggtgaacaaaatggcagacaaactggtgttgtgagctagagataggccagccagaagttctctttcctcagtttgtcatgatttgtaacactatacttcttctccagttagctctcagctatctgctctttcagggagatccacctccctaactcaggtccatatgtaacggggagattgttactcgcctatgaaggaattcagtaacagaatccagctttctttctgctacgaacaaatgttcaccactgtagccacttcagtatgcttagagcaattgagatactctgcacataaacgaaactagcaacttgaggtctgcaagagccaagagtgcaagtgggttacccgcgaatccacttataggttaaaataaacaaatgctgtgatcacacctccattgcgacgtttcttcaggtgacgaaaagcctgacgagtagtttaggcccccgacagggccctgtttatctgggctggttagatggctgaaataccggcaaattggcaaagtttgcctggtggacggtgtgtgcaaattgcaatgactccagccatatggtactgaaaatgagttggcatcactacatcactgcgcctcgccgcattgaaatgtggaaatgaatggagttgccctgcgcgcagatctatgattgggccgtgatggacgggcccgattcaacgggacaagccgacatcacctgggacaaaaacggactggctgggcaggtacccactcagatcttcacctacccgatcagtaacacacagaaagcagaagcaggtagtaaacccagaccattctcacatccatggctcagtagatgtggatctccattttgacttcgaacgctagctgctttgccagtttgccactgaagaattgagacagacagccagacaggatagttaataccactttttaaaaaaatggattaattactggaccaaccccaatgatcatccagacatcatctgtgcaaagcatatatgcaaagaaaagaagagaaattggtggtggcatactggcatcgccttaactaacgcgctacagttgtaccactgccgctgcgcgcaggtcgtgacgctcacgtcgtcgccactagtccactccctcgcttcgcatctcgcctctggtgatgagagcggacagagccgagctgagggaattaaaacccccttatcctctctctgcccccgggctgccattgctggatccaaccatctgcccccgccacgcctcgtctcgcgctagccgtctcgcgtgcgtgcgcgcgcgtcgcgccgcgccctcgttttggagccttgcgccccgctactttccccttgtcccgaacccggaatccgcctcggcgagcgtccttgctttgcttctttggtatctgtgctcccgtttgctttgccttgccacgctccttcctcctcctcattgtctcctcccgtggttcggctcattctgttcttgggttgacgcgggctgcgtgcgtgcgtgcgtgcgtgcggaggcgatgtcgtcggcggtggatgccatctcctgttccaagggcatcgcggccccgccgacggaggaggcgacgaaggagcgggtggcggtggtgggcaagaacggcggcgtggagcacggcggcgacgccgcgacgatgaacgggaagcagtgcggcgaggcgccgcattgccgcaaggagagcaacgaggaggaggaggatgacgaggagaaggcccccaaggccatcgacctcggcccgcgtgtcagcatcaaggaccagctcgagaaagacaaggtaccactactcattcccgccattgctcgaattcttgcaagcacccgccattttatacaacgcatccaattcttcatgcgtttctgcgtgttcttgcttaattgcaggacgacgagagcctgaggcggtggaaggagcagctgctcggcagcgtggatttgaactccgtaggaggtaaaaattcctcgaaccaaatccatttctactaaacgtttttagctgcgtcgtctcgtcgtcctcgcgatctcgtttaatggcgccggccggcacatgcaacagcgttgcatgtgagcctgagcaccgccttgtgcccttgtcaaagatggtcccgtgataatgcacctgtgtacctgtccgtgcttagcccccgttctatgggccacgactagattcatccatcgtctatagtattcatccatgcatgcaccgcccccgtgagctccgtgttgcattctactccgtacatttgtgatttgtacgtagaaaatacggtagaacagcaaaagaaaaagtgaaatatgttgggcttggctggacgggtccggcgttttcaatgcaccggttagatggtcctgttaataactcctgtactttgccgtgcatgttcggcttgtctgataatgaatctggtccgggctcctaattgaagcttgaactaatgctttcatctgatcatgacattgacaatgccttctgatcttaatactggggaacagtgcatttctgttgttagtttatatgctagggtgttggtgcttttaagatcaaatggattttgaatagtggcctaaaaagacacatttttgcatcgcataattctagcgaaccttggctttttgtctatgctttttagactagtgttgaataaaccatgattcatatggttgtggttgtttaaccaaataatccgaggatgatggctagctgcttcacggtcggttttaggatgatcattcattcggcatctgcttgtcttccattagaattttaaactcaaaactacggccaatcatttggcctacacgtcctggccattaggatgcaataatgtcccaaaaagaactgacccaataatgaggtctgaagtctgaacctgtcacgcttgattttatcggtgcagagacgttggagcctgacgtgaagatcatgagcctggccatcctctcgcccggccggccggacatcttcctgccgctgccggtggagcccaacgccaagggcgtctggttcaccctcaaggagggctccctctacaagctcaagttcaccttctccgtcagcaacaacatcgtctccggcctccgctacaccaatgccgtctggaagaccggcatcaaaggtatacccaaacacgaaaaacatttaattaggtctccaatagatgaacaattaattactactaaaattttataaaatccgatggatttagcgcgtttgaatttgtgcaaacgcactcatggttttggttcctcccgttggggcgtgcagttgacagccacaaggagatgctcggcacgttcagcccccagccggagccgtacacgtacgtgacgccggaggagaccacgccgtccggcatgtttgcgaggggatcctactcggccaggacgaaggtacgcatgacgcgaattttctttgtcagatatcagctgcttcaggaaacctgcaaggttcagtcgctcagcaatgtgttgttaatttattcttgcagttcctcgacgacgaccggaaatgttacctggagatcaactacaccttcgacatacgccgagagtggccggcgttgagctaatgatcagctgagccgtttttccggtggtggtcgccgagtagaagggtgaggcgccggccggccggcattcatgctgtgtgttactgtcgtcaccgttgggagcagaagtggacattttttttttcgtctcgtttgcgtcttatccactcatttttttttttggtttgattcaccctagggttcttttgtatattgttgccctgtctgtcccggttgtttgctgtgttaacgccgtgttagacgtacgctttgtcagttcaagttgatgttatgctatgtgttatgtcagtgtgcgtgtttgagcttctgtcactctgtcagggtcctgtttcgatcgaactgcctgtttgagttcagagcaacgcagctgcatttcttgtaaacactgggactgtatctgacgcttcccttacaaatttcccattctgtgtgcttctctctgcaattacacgaaagacatatacccataggccatagacatcactatacatacacaaatcaataaatatactccctaatacatactcaaagacagaaaccaatgagaattcctatactaaaatcccattaaaaacatagctgtgagtatataatattcgtggcaaccagagaccaagacttaaatagtgggtggtagtcatgcaccctccaccacgaacatcaccgatacttcctctccatgtataattgtctaaacttgttttaccagtgttatgccttgtatattagagtgggtaacttcgcggatcagaggtctgaggattcccgtataatttagggtgcaagcaagcaagcagtagctggactatttatcatgggtccccactccaactcctcggcggattcatcacgcaagatgcatgtggtcaaagctttacttacatatagttgcagcgattggctaagggatgcaaagttgcaaacatgtgggttccttccgttcacctgattaaagaggaattaatagcaacacaagttagcaactcgagtaagcgggccagaaagcaggctggagcggtgatttcaggcagcccacccaacgttccaaccaaacctaccgttcgtgtgggccacttttccggcccgcgcagaggacgatccagccggcaatgctggattggcccgtcaccttccccccttttcgcgcagcgcgcgtggcccatgttttggataggtagacttcgcggcccaagctggtgggtcaaattcagaagatatagtcggccctgctcctcggcgaccacgtccgagaggagcccgaggcaagcaaaagcaacaggatctggcggcttcacgtcatcacgtgaccagagtaaaactttcacgcttggaaagcggtgagcacgttcagaccccgtcgtctcgtcggtcgcatgtgaccggggcgagagacgagagaattcgcaagcaaaaccatcggggacgtctctctatcaacagcggtggatttcgccgttttcctgggcatgcgtgatcggtctcaactccgtgttttccttttttttttcccccgtacgccgtcacatcgccggcgatcggatccgcgccaaataacaagcaaccgatgtgcgcactggcgaaggattcgtccagctttccccccgcggcgcgctgtgtttgtcgtgctatcgctttggatgccgatggaaataacgtgcgtggaatttagccgtccttgttgagttattgtgtgttggcgcgctgcaagcctggcgatctggcgctttcggaaaacggcattaaccaggaagctggaacgacagtgcaggacagtggaggagctccggtgtcagctcggctccgtacgaactcgtcgatgcttcccagggtcttcgattcgatgcatcacgttgtcgaaccgttcggccagaaaatgccatacttcggatgtgtttagtttcaaagttttttttaaaacttctaacttttcatcacatcaaacctttcatacacacgtaactttttataacttttcagtcacatcgtctccaatttcaaccaaactctaaactttgggccaatctaaacacaacctgattaattcaatactggattactagtacttcggtttagagaatgagctcttctctgcattgaatcatcctggagacctgaatatttcgatagctttgcggataaatgcgcgctgtgtgcagtacgtgtgcccaaggtacgcgcacgcgtgtctgcgtgacgggttcacgttcggcgggagcacggattgggggggggggggggggggtatgtgttgtacaggtaagaggtgtttggtttgttctggctgtgaacagtggcacgtcggaacacgccaaagaagaggcccgtggcgacgacgctttcggcaggggataaaaaccccacgaaaaattatggcaagggcaacaagatttgtcggcatgagcagcaagatccgctcgagctccgggtaaacaggtgccggacaaattttggttttcttggttgctttttgagaacatgagcacacgaaagctggttgactcgaataagaaaattacacgagagagtttcttctcgaggaaaagttggaggatctttaattgtatttttagataatgtattcacaaaaggatctttaatttgtattcatatagctggtgctccattgctcctactttctagggagataggtgtgttcttttgagttcaatgtaatggaacatacaaacaataatttaactattattacaagattaaaaagaatggatttgaaatagcatcttataatgataactatatatgtaaaaagtttttaaaaaaatcctcctatttaggaactcgacctatgtgcatttttgttcaattttgagaaaagaaaaatacaccgataatatgtaaaacggacactcatattgttaaagtctcgcaatcgaaacctcttccaatgtaaagcattcaatgtcttctattacgtatcatctattttgcacaaccctttaaagtccaaataagttagaccttggttccaatcgtttaagatgtggtaagcccaaagaaaacaaacaataaaatgttttttttaaaaaaaaaactccatatctgtgttatttctttcattatagcccctcgtagagcccaggtgctatttccttttccttttctttttctttgaaaaaaaaacaacgaatgtgctaattcttaaccctgaggaaacctaaaatcggagacataccagcgaataaacaaacaaaacaaacaaacgaaaccgacccacctgacctcctgtcctcgtctccaccacttcccctcccctctcccgcccccacgaaatctgggaggagccacgacgccattgccaacccttcttctcttttccccccaccgcaaggaaagcacttccggcgagcgtcgacgacgacgaatcgtcgcgagaaattcggaaggtacccctaccctcgtccccccccccttccccccgtcgcctcgccgcgccgccacgcgcccatccacgcggcgtgcgcgagggcgcggacgatctccacgttcctgttttttttttctttgtttttcgaggggggtttggttgcggccgttttgatctgagatcttgttgcagtcgataggggaggtcggggaggaggggggagatgtcggggttcgtcggcgtcgtggtctccgacccgtcgctgcagggccagttcacgcaggtggagctccgatcgctcaaggccaaggtgacctaaaattatccccggtttcttcagttcgttgtataggaagccgcagttcgcctctcattcggggtggaattgatgggttttttttttttgtcggggtggcagtttctatctctgaagagagactccggaggacatgccacgacgaagaacctcccgggactgatgaagaagctgagggggctcaatgaggtgatctccgaggaggagatcgccgcccacttgtcccagtcttaccctgacgccgaccaggagattgagttcgagtcattcctacgggtacaactcggttattttctgaattcctgttggtactgacgagaggaatagagcgtcattgcattgttgatttgattggaatgggattatgtgtggtgtgtttgtaggaatacctgaatctgcagtcaagggtgagcgccaaagaaggcggaggtggtggtggcggcggtggcaagaccgcgtcatctttcctcaagtccagtaccactacattgctgcacaatctcaaccaggcggagaagtcgtcttatgtggcgcacatcaacacctaccttcgtgaagacccgtttctgaagaagtatttaccaatcgagcctaccgacaaccagctgttcgatcttgtcagggacggtgttctgctatggtgagagatggtctttacagctaaccaaagggtgcatatccatttactcgttgaacagaaactgcccttgagtcatagctgatatttgctcatttatggatcatttgctcagtaaattgatcaatttagctgtacctgggaccattgatgagagagcaataaataagaaaagagttcttaacccatgggagaggaatgaaaatcacaccctgtgcctcaactctgccaaggccattggatgtacagttgtaaacattggtacacaagatttggtggagggaagggtatgcaacgcattccctactttaaattctttttagtaattcatggtgcattgtagtctatgcaaattatttttaccactaattttcattcaggactacattgaaatactttaatgccctgtaggtgctaggtagtttgggtacaaagtatgctgtcaattagtcattgtcaccactaatttgctgcataccattttatccttcgctgtataacctgctaattggttccacctcatatttccttgctcatttgctgtatgtgttattctttgatatgcttgtccatgtgtcagatgttttcagccgccttccctttgtgacttcttctatttaattcaagaaattcactaaaagttaagttgtggttaacatgcttcttttttgcagcctcatttaattcttggattgatatctcaaatcataaaggtaaatgttgcactgagttttgcattttgatgtttgacatactatggttaaactcctgcctcatcatataaagatctttttgcacttatcatcagattcaacttttggctgatctgaatctcaagaagacaccccagctggtggaattgtttgatgacagcaaggtaaataaacattctgtccttctattaatttaattcacatgttcttagaacaaaattcattttactgattattatgcaggatatagatgaagtgttgagcttgtcaccagaaaagatgctacttcggtggatgaaccatcatctgaaaaaagctggctacaagaaaaccgtcagcaatttctctacagatgtgaaggtgcatatgacatagaacaaagtgacattataattaattgattatgtgcagtttgataaaagaagctgcccttgtgctaatccactgtttggcttgcaacatctttgcatttgggtttcattgactaagcaacagatggctttgaaaattatttatgactcactcttatgctgtaaatcccctttctaaatgcgtatgtgggaaaagtgaatcaaactacattcatttaattaatattacttcaatctccaatgttcacatacgttagttctgtacaggatggtgaagcatatgcttaccttctaaaagctcttgctccagagcattcccctgaaaccacattagagacaaaggatcctagtgagagggctaaattggtacttgaacaagcagagaagttggattgcaaaagatacttgactcctaaggatatcactgagggttctgccaatttgaatcttgcatttgtggcacaaatattccagcatcggtaagtagtatgtttcttgtttctccaaaggcattaacttttcttttttttatcataaagctagctaaggtattttccccatgttgcagtatattcactttaaaagtttcttagctagctgccaatgaattggtcatctgcttatcacttgaatgctattgttccatgatgcacaggaatggtctaactagtgacaccagacaagttactctcaatcagactgcatcacgtgatgatgttctattatcgagagaagaaaggtcctttcggatgtggatcaacagtcttggggttgactcttacgtgaacaatgtttttgaagatgttcgccatgggtatgagattatttgaatgagcatttgtgtctgtctccaaatgaattgggcacttacatcctttctcatgcagatgggtacttcttgaagtactggacaaagtttctccaggatctgtcaattggaagctggcctcgaaacctccaattaaactaccattcaggaaattggagaattgcaatcaagtggtaaaaatcggaaaggagttaaagttttccttagtaaatttagctgggaatgatattgttcagggtaacaagaaattgattgttggtgagtgtgactgaatcaagtctttttagtggtttctgattgatgttatctgtttagcacacaattgaagccatatctgttgtttttcagcacttctgtggcaattgatgagatttaatatgcttcaattgttgaatagactgagatcccactcccaaggatcccaaggaaaagaaattactgatgctgatatactaaaatgggcaaacagcaaagtgaaagcatcaggaagaacatctcaaatggaaagcttcaaggtgttattaatttctgtttaattagttttaatttgttgttagataactccagttaataaattttcttatcttctctcaggacaagagcttatcaaatggacggtttttccttgaacttcttagtgcagtacaaccgagggttgtcaactggaaagttgttacaaagggggaagatggtctgttcatatgcacgtttgaattactatttgatgataatttctgactgtttatatatgtatccttttggaaaaccgtagcattggctgattcactatttcctttcaattctgcagatgaggaaaagaagctaaatgctacatataccattagtgttgcaaggaaaatcggatgttccgtgtttctgctgccagaggacatcattgaggtaagggatgctaataagcatgaaattgagcgtgcaacttttaccatcacagatggaattaaatgctttaccttcagcaatttatctagcatctgggctaaatgctttactgtctacattatttgttgtctgtgatcctcttctcttttatcttgaaaaatgatggttattatctgttgactaatcgtactcttatgtttctgtttcaggtaaatcagaagatgatcctaacgcttacggctagcatcatgtattggagtctacagaagcaaccacagtcacaatctgaaacgtcagaacaatcagagccatctagtatggcttcggatgcagcttctgatattgcttcggaggacgctgcttcaataacagctgcatctgagggagaagaggtgaattcgctatctgatagtatgtccaatttgaccacatatgatgctatttcaaatgccccgccagcagaaaatggaaatggtgtggcaggatgatgatgattacacgggctgttcttctgtcctgatagcggttttattatggtggaactagtaccgtcatggtgtccaacgtttgctgccagaagtgatttttttcctgcttctgttccaagcctacttttgaggtagcatgatagatacagatacagatagatagagttgccgtttgttcatttaattttgctctatacatacgacagggaaaaaactatacataggtcactagttgggcatttcttgtactcttagtatactttgatttcaatgtcttcactttgtttcccggacctgtcaaaatgtactggcatcgtttgtaatctgctgctgctctggaccattcatgagctgtatataacataatattgtggagagatctggtttcccaagaatccctgttcattgtttacagtactcttttcaccaatctatctctatgctctactagcagatttgggccgtgtttagatccaaagtttttcttcaaactaccaactttttcatcacatcaaaactttcctacatacataaacttccaacttttccgtcacattgttccaatttgaacaaaactttcaattttagcgtgaactaaacacagttcgggtatgacacctgttttaatcacatcaaaactttcctacacacataaacttccaacttttccgtcacattgttccaatttgaaccaaactttcaattttagcgtgaactaaacacagttcgggtatgacacctgttttaatcagtctttgggtgtgtttagttgacgccaaaattggaagtttagttgaaattggaagatgtgatggaaaagttaaaagtttatgtgggtagaaaagttttgatgtgatggaaaagttttgaagtttgaagaaaaaatttggaactaaacaatgcctttgttccgttggagaatgctgaaagtgatcaaccatgaatatttcagttctcttttcacattggcgatgctgcctcatcatgcaacgaagagcaccagttccacgtttgaggttcatagaaccgacgaaaaccacttggttttcacgacatttcgtggttttgagctggcttgagttgacaaaccactctgttgactgttggagtatcaatttgaatcttaaaattttgacaatttatctgaattccatctcttttcaaacaattttcgccaaaactgacaaaaccaacactgagcgattttcggtcagcaaacggttttgtgaaccttatgcatctgagaactgagggagtggtagaatttgctgcgttttcgattattttttttaaagaaaaaattgctgctgctgttgctgctctctctatctcttatctctctctcaaataagagcagtgtgcagcgtacgtcttgcaaaaaatgagagcagtgtgcagtgtacgtcttgcgaaaagatgcctttagcccctacataaataaatacgcatacagggccagccatcagatgctttggagggctccatgccatttctgctctttcttaagacgacgcagctgccttgctgccggtgcctggacaccatcgcccacagctccctccctctatctctctctctctctctctctctctaacaccaccacacatctcctcctttcttcttctccatgcaaaccgacgcttcatcgaggagctcctcgccttcgccatggccgccttcctactccgatccatctcgcagaacggagatgatgagcagcagctgctggtggtggtggtgacacctgacacggcaatgcggcggcggtcgagggattaaaccggcctaaaacgtatccattccgcggcatacaagggcaggccaggcatctgatttcctacctacattactactactagtctactactgctactactacatattatcatttcctagctagctattagttcacttctcgatcgttttggtgttagcttaagctttcttgatttcttttgctgccttagctttttcttttttttcctttgcggcgacattgttgcagagggcgctgtgaaatgtgaataacctctcgcgttttggatgatgagtcgtcgctcgcgttggtcgattgatctctgtatcgtttttcctgtggtgagaattgaggttggtgatctgcaaaagctagaacagcgtgatgatttctatgtttcttttttcgtgcgccaattactcgatcttcttgcttagttatagctgtaaatattccatgacaggagtgtggtcagtggtgcacagtagctaactgaaatcctaatgcccgtctcgttcgcatgctgctgaaacagtacgcagcatcgcgtacaggctctcggcaagtaccacgagtcaaggcgggtacagtttgccctttggcatttgggtagcatagcaggacaacatatttacacaagagcttttcgagctcctttcgaaagaacaaaaagttttaaactgtgtggtgacatagtaagaacaaagaacacagcatctctgactctgcatgataccaaaatctacgatcaaattcttgtagcatgggttgggaatatcttgtctctgctgcggcatatatatctgctactctaaccatgcattccggatgctgtcctttgcccaaggggcaagaaatgcctctttcattcctaactagttgtgccatatccctgcatcttcaacactttcatattccttcactggaattgcatattcatcctacatgcatgccacaatgctaccacaccaggaggaatcacactgccacttgcgatcatcatctgttcatttaattcttcccctgttcgtccttgaagccccgcgcgctagctagctcatcacacagcagcatgcatttagccatttactgccatcgcctggagaactctcaaaggcgttaatggcctgcctagctgcgtgtcagcgtctgtgtgtgcgtgccactgtggcactgtcactgtgcgagagcgatcactcccccagcctcgctgctgcctgcaagagcatttttctcaccggtactacgcgtcctacacatacatgcacaatatattctactagtacttgggctgtttgatagtttgatactacggtggatgggagtcctaccaaaaccaaaaaaacttagcgcacgatccgcacatgcagtcgtcgctgtctgattttcccataaattgtggtcggattattagtacttgcgcagacagggcagggaccagcctcatttgcctcgctctctctgcaatctgcattgccattgccattgccttgcactgcggctgcgctgctgcccagtcctcctcgagtccagccagcccaccaccgcatgcagacgctgcagcagcattaggagatgaccacacgggcttactagacgagcacaacctacgagctgcagtctgccggctgacgcgtggggcccggcccatttgtctggcgtgccacgccacagtgctgcctcccttctgactagtactgtggtgactactgatggatgatgtggtgagtaggagagtaatatactgtacctaaggagtgctcctccgtaaaaagttctagttataaatttggatatgtggctgtgtgttcaaatttatagctacagttcatcttttttagggtagagtagtactccgtaagagtagaggtggcaatgggtcggatcagacaatagacggaacattaacacgtccggcctaagacttgatatcccttgtctaggggtgaaaacggtttgagtatttttttatatccagacacatttgttttaaagtggttcggaaaattttctatatataagacgcatttgtgtttagattagttctatatatgttgagtatatataagtacatgttgagattagagaccaaatgaaataggaatgcgtcaaaatcagcaatagacacatatatcaggtctgacatgggttactcactggcataatataaaacccatatgcgctcaaaagaattttggatatcggatcaaacatgtccacgggtaacaaaataaacctacgctcatcgggtgggatacccgtgggtatcggactagaattgccatccctacccagtaaattgctaccactagttccttaattttggatgcgcggacacatgctggcctaaaacaatgcaactatgcaaggctagagcttagagtttagcaccctgcccatgttctttagcttttcaaaagctccccattggtgctcgagtttgtgctctccttgttttttccccttcaaaacggattcacgaacgctcatggttcagagttcagactagcagtaggcacaggactgtacattggatgatgccttttgagtagttgaggctgagagcggagatggtacccaatggcggccgatacgagtgatcgcggtaggggttgtcgtcgtcgtcgtcgtcgctggcgctccgctcgctcgcacgcccgcctgtcgttttgctcgcgtgcgtgcgtgcgtgcttgcctcgatcgatcggtcggtcggtcggtctgtcgcctcggcacgcaggcgcagccgcgcgcagcgaccgcgtcgtgcgttcccttgtttgggatctcgccaaccacccgcatcacaacgcggctcgcatcacgcccgagacacgcacacacgggcgagagacgccgcgcttgccgggttggttgcctggtttgactccgtttttttttcttttttttggtttgatcggcagcacagcgcctcccggcctcaaaattactgtagtaccacgagatcgatctcgacccgtctcgtcgtcgtcggctagaagtaaaaattctggatccatccatgccaaacaagtaaaaatctggatccatgcgaaacaagtagtcgaggttgaatcggatggatgtgctcagacagaggcattgccagattggctgcttgcctgctgcaaggtactcaacagtggcaggatggcagggagctacgctacgcatggtccaggtggtctggtcgcgaataggaatggtggaatgcgattatggctgtgtttagttcactgtgaagttggaagtttggttgaaaattgaaacgatgtgattgaaagtttgtgtgtttatgataggttgatgtgatgaaaaaagttggaagtttggatacaaactttggatctaaacacagcctagatcaaacgcggaccgccggtttgtttttctggttttgaaataggtgagccggagttctcatgagtcatgatccagccgaaccagggccgtgctgtcaaatttgtagaccctgtacaaggctctaagtgaggcctaaatcaagtaccaaatatagctaaaataatatatatactgcaaaacaaatgtgatatatcaagaatagtatattttttaactcttgttttgtataattagaaactgtcaaactgaaaacggagaatgtttgttgatgttgctggcttgctgcctagtgccttgcttgttggttgcttgctaagttgctattcgctagttgaatgaaaatgtgaaattggatgagccggctggcggcctggtgctcggaggagacgagacgtcgagactcgagacaaattgaataagtcacagatacgaaaacgaaagagaatacaaaacgttgtggggcctcggggctcgaagttgagaatacgaagcgccacgcacgcgaagtcgccacgcggagatacgcgcggactcgaacggggttctggcgctctagcctcatacaaatacatgtgccttctttggttgggctgattttttgaggccctagaaatttgcaggccctgtacggtcgcacgggccgcacacccctgtgcacggccctgagccaaacgttgagtgctccactccgttactacgatacgatgctcgtaaaaatatctagatgagatttcagtagcgcgaagtaaacataacttaactaaatatatttctttgtgatgaaaatataagtactcgcatttacgactaattattattttagtggtaagtgacataccatcgatagtgagatgttcgtgctgatttcgttaatctcaagctatgcctgagatgcgggtgtacgtatgtgtcatcatgaggtgagtgtgaacgtgttataacttataagcgtctgtatttgtagttttttttataagaaaaaaagatttcaatagtaaccagagtccacttagatgaactttctgctgctgggctgcgccgacgtgttcatgacttcaggggctatcccaccgaggaacggtgagcacgcgaaaagagagaaggaattatgttgctactaccgcgataacaccacacttatcacgataacggattggttatcaacaaatttcacagaaatttcatcaaaatctatcgaattatggcttgacttttacgctattcgtcgtcgtcgataaccggccaaccgggcaataactgggccggctaccattgacaacgcaaaccaaaggaaacaagccggccttatgcgatggtaagcccacacgagagaacagccaggtagggattatagcccaacgctcccatcacgacccactacctttggcccatgggagattgcgaatcgcggacgaaaaaagtgcaccgaagttccctcaatttgtcatcgagttacaaaatcgtcctccaaccgtaaaatcggatacaacgcatccctcaacttataaaaccagtgcaaactagaaccctcgatagttttgactctagttttgtctgacgtgacagctgacttagtatagtacccatgtgggccccatacgtcagggtgaccacgtcatcatcatctctttcctctcttctctcccttccttctctctctctctttcccagttttctcctcatacgggccaggcggtggggtgatgtgggaaagggcagctggcgacgggcggtgcggtggcgcgacatcggcaacactagagaaggggcaacgcggcggcgacggcgggtcgggagcaggcaggcgccgcggcggtgggcatggaggtggagtggttgcgggacggggtggaagaagaggaggtcatcgaggctctagcacacgcgcaggcggcgcacaccggggatgggagtgcgatggcgttgcggtagagcgagcatgaggcgtgcgcacggagccaaacatctacgcagtccatgtggaacgagtgcgcgcagagcggtagcgtgcggagctcgtcgccgtcggcaaactcgagcaggcacacggtgcagacgcgtgcggcggtgtcgtctcctccgcctcccccgccgccgtagccgtgcaccgccatcaccgacgacagcaacttgatggcggcgccgttgaatcgatcttggtgcaggcctttcatggcttcgggttcgaccgtcgaggtcctccagctcctccattgcttgtctgttgcctctaagaagctcaccaacggctaccacggtgcctgtttccacctctgtgcccatcactgcggcgcccgcctgcgcccaacccgtcgccggccgccctttcctgcctcgcccctccagctgacccacacgaggggtgcggggaggccggcgagctcgtgccgctctgagcccgtgtgtcgccacctggggaagctaagatccccgggagccaccgtcgccagccgcaccaccctttagccgcgcgcgccaccgtgggcgccaaccctagtgccatgcctgtgtgaaagcagagagcgagagggaggaaggaaggagaaacatagaaagtgaagaggggaaagagagtaggtgctgacatggacacaccgacatgtggggtccacgtgggttccatgctggctcagctaccatatcggataaaaccgggatcaaacccatagaaggatctaaagttgacggttttgtaagttaagggatgtcgtatatctagttttgtggttaggacacaattttataactcgttgacaagttgagggacctttggtgcgtactttttccaatcgcggacgggaagtgatgcgtgcgcagccagtgtacggccggccaaggtcgcgtgggtgatggaacccaaggtcagcggtttcacgcgcatgaacgctaccatccggcgaagcgcacacgcacggcgggttccgcggccgcggccgcgcgcgctagctcgccgtggcttcgcgcggctgctacgcgggcgatttctacccccattcacaacagtcaacaaccgcatggcgcgcggtgagtccgaaactgacttgcactgttgcacaagcggcgcacgcgtccaggttggtcaacaacgcgtgcaaggcattgttgatttcaggctttcagctacagcatgttgacacacattggcctcgtggggatcaggcccgaacattctggcctctgttagagcagatacaatagcaggctataagctagctacaaatatattttaagaagataaatgaggagagagaagtgtagcgggctacagatttatagccagctgtaatacggactccaatacataatgtgtgtatgacaggtgggaccagttattgatagtgtagtatgtaactattgtatgaatatgtattagattggctatagatgaattggagccagtagttggctatactattgaacttgctcttatcatcaaggacgtgtgttttttttccacgaatgtgcagaaattttgcacgtcaatatattagaaaagagtagcatacaacggtaatacgcggagacggttgttggggataggaggtcatgtacagtatgacactaataagcaagtactccctccgttcccttttgatcatcgtattgcaaaaaaaataataattccattttgattgtcgcattacggtggggaggagatgaaaatcccgggaaggacgttaatgacacttcctaacgaacactacatgcatctgattggttaggctatacggcatgtagaactgattaggagccgctgcatgcatcgatttaatacgctcacaactgattggccagccacacggcatgtaaaattgatggcgttacattcacggatacgaaacgctaatgtatgtttttgatgctgattaagtgctccacatgattgtcttggtattgatgcacaaatcatatatgaagatcgattaggaatggagcgagtatgacactaataagcagactgcgacaagcgaaactaagcaaagttacgtgcctgcctcctgacaagataggcgtaagcatagtgagagaatttttcaccacgcatacaactcaagcgcaatttcaattcaacaagcaagcatatttcatttgccaggccgactggccgagtatttgggctgtacgggcggcggccgagcaagtcagcctaggacgatatgccaggaggctaggacgaaaggaaatggctgaaagatgcggggagccaaggacatgaaaggactgaaagatgggggcgtgtgatgtgactcgtgtgctcacgtttttctttcacaagctcaaagaaagctgaaccaaatagaccaaaagaccaaaagacgaacaaatctgtgactctcgcacagtatagagacaaggaactaagtaatatcttactaggtgacctatctgcttacgtctatttttctcccacatctatacccatgcaattgagatcctctgtggtactgcatgtgcagtactgcttactgacatctgggcccgaggggctgtggggcccacatgtcagtgagcagtactgcatgtactgcacatgcagtactgcagaggacctgcatccataccaatgctactaaattggagtagcactttgcgggagcttgcaccagtgttcacaatctttattaattccaaacgatttttgtgaattttgaacatctcgagcatgcttagatatcgaatgggggttttgttttgactttttaaaattcatttggaaactgtgaaaatcaacgtatcgatacagctcgaaattcgctaaccaatcaagattataaatcatagcttccatattaaccagaaagatcattgttgattggattgatcgagcttatattctacgaagtatgtcatattaaataaaacatgtaattggaaatgtcatatactctttcttttttggttttttccaacatttgaaaattataaaatttaaaattagtaatgaagcaatacatgttatgtaatcagcaacccgataaacaaatattcctatgtctctggttagattcttgcaaacaaagtagacaacaacatagaaatagaaaataaaacaaaagactatgacaaaaaagagtcgcatagatagaactgaagccttcgcatcactcttgtgcgagtggctcgggagcgaaaccctagccgcccgtgccgccacctcccacccaaccttgacacctcgcctccgtcggagttcgccgtcggaaagtcgagcgaccagctgggaaggcggagcagccagctgagaaggcggctgcagagacaagaagacctgacgaggcccgtcctcggcgtgggaggatgaagtggtgcacggcggtagccggaccctggcggccagacacggaaagggcaagtcggatctgatgcccctcaaggcagatgcatggacgactgtggagggcggccgcggaagcgaaggtggtggtaatggtgccagatctggtgctcccatatccaatttcggcagcgatgcaatgtctcagcgcggtaacgctgcatcgacgaagggcaattgccaatgtttggaggaaggtggagacgacaacggggatggggagaagcaggcagcgactgctgggtgtggggctcccaaaggaagactggcttagtacgaggcgcatggccggcggtgggtggccaacgaggcgcatgcagagcatggcacagaggcttgtggtggagctcccgaggggaagttgtcgtggcacggaggagcacgaccggcagcgagaggccagcaaggcacgaggagagtgcgctgcggaggcggtgaggctgacgcggaggctggagcggtgtggcggcgagcctgtcggggtgggagcatgccaggcctagggtgatgcggcggcgaggctactgcggtatgaggacagacgcaacaacgatgcgatcaggcgactcgttggagagacatgggtagcttggtcgaggatgaagtggtccttgaaggctacggcgagctcctttccaagcgttagtacccttgcagtggcggcttgccgtcgcaagatggccacgttggacgggctagtacaggggagaggggatccattcttctctctcaccatcttcttctccaacccacccatgtggatggatctggagcgcaccggaggtcgagatcctactttgatagccggccggcgacaaggcgtcggcgtggtggctgtgcgttgaagaggattagctagtggtgattgtcaaaactaacaggcactcaataacctgggagagtagggaaaatatgggcgaagatctagccttcaggatggctatggcgacgcctgcgggcgccgcgttctccttgggtccttgttgcgttttttttcctctcccagtggtttttttaggtgaaaaccatatcctgattctctaggatgggcagcggcggcattcttggcgccgtttccttcttggaggcgtcgttagaagatccattccttaggggtgttgtgtgcgtgttttatttttttagcagcaagatcgatcagacgtagacgcgtggtttggttgtatttttctttttcttgactatagtcttctaggactatagacttgtattttatttctactatatcaatacaaacgttgcactatcttgtgcgggttgttttaacaaaaaaaaaagactatgaccaaccctaactccatgaaaaatcatggtagacaaacccttaaatgacttaatagatctaattgctaaagactttattcaacacaaaccttaagagcttattaaaattagacgagagacggatcccctccctcatcgcatctggtgaggatgatggaggcaaagaaggagggtgattggagtgatggagagaacccatgtagatcttaatgtgagacgttgaagtatggactcaggaagcactttctgcaacaactcatcttaatttctatgtaattccctatagtttataaacaagttcggaataaataagtagagtttaatctcatttaccttcgcaattattgtaaaagtacgttgtaatatccaacaactacgaaaattaggtaaattacacacctcaccttccattcaatccgtacatttatacccccccgctccccaattcatgtggttctttttttttttgaaactccaattcatgtggttctggtttggctatccaacatcgcacttccccgtggcgaatgacgtggtaacttaataaaatactcatctctttcttcctctctagctccatactctacacattcaaattatgaataaatgtgacagtgtagagtatatatttttcaggttttttacacattgagggggaaaagagataaatgtgagcgttaatatagtattagtgctgttcataagttggatttatcttttttcttttgttcatagtgagcgttagtgcgttacacattgatgagcagtgatgactgtcgactgatgaagcacatgttatgcatgagctagcgtgaaacaagacgacgcgcgtcgacgagaccacccggccccgaccaaggctgagagaaacaagtcacagaaattgtacgtacttgtaatggacttattaaccgccaacacaacctgctggccctataaattgacaagtactcgtgctcttcagctgcaaagagccacagcgaacaaaagccatatattgtaacgaattactacctagctagttaacctggtctctccagagcaagctacccgttagtcttgatcagctagctctagctagtagttagccatgaaggtagagcaggacctccacatgagccggggcgacggcgagaccagctacgccgccaactcaaggcttcaagtatgcagtccctttctactgtgaaatccgtgtgatcaaacaaatcacatgcatgcaattacttcctccgtttcacagtgtaagactttatagcattgctcacattcatatagattttaatgaatctagatatatatgtatgtctagatttattaacatttatatgaatgtaaataatactagaaagtcttacattatgaaataaaggaagtaaccaacacaactaatgttgcacacgtctggtataccgaatgaagctaatgcatgcttgattttgcttgacatgttgttcaggagaaggccatcctgaagacgaggccgctgcttcacaaggccgtcgaggaagctcacgcgtcgctctccggcctctcccgcgcgcctgcaggcggcaagatggtggtggccgacctcggctgctcgtcggggcccaacactctcctcgtcgtctccgaggtgctcagcgcggtggccaaccgctcatcatgcgaccacaagtcctcgctggtggcggacgtccagttcttcctcaacgacctccccggcaacgacttcaacctcgtgttccagtccctcgagctgttcaagaagctcgccgagatggagtttgggaaggctctgcctccctactacattgccggcttgccgggctctttctacaccaggctcttccccgaccgctccgtccacctcttccactcctcctactgcctcatgtggcgctccaaggtaattaaacacagtgcaaaaattaggaaaagaaaatgatgatcgagctagctatacgtaactcatttcccgtaacgagttgagagaaactcctgcgttcgattcttactgacatgagaacatacatccaggtgcctgacaagctagcgagcggtgaggtgctgaacgcgggcaacatgtacatctgggagaccacgccgccgtcggtggtcaagctgtaccagaggcagttccaggaggacttctcgcagttcctggcgctacgccacgacgagctcgtctccggcggccagatggtgctgacgttcctgggcaggaagaacagggacgtgctccgcggcgaagtgagctacatgtatgggcttcttgcccaagctctccagtccctagtccaagaggtatatatacaaacacattgaaccagtcactctatgtagtactgagacgaacacatttgattgatcttgttgctaatatgcagggacgtgtggaggaggagaagctggacagcttcaacctgccgttctactcgccatcggtggacgaagtgaaggcagtgatcaggcagagcgggctgttcgacataagccacatccagctcttcgaatccaactgggatccacaggacgacagtgacgacgacgacgtggcgacgctggacagcgttcggagcggcgtcaacgtcgccaggtgcatcagggccgtgctcgagcccctcatcgctcgtcatttcgggaggtgcatagtggacgacctgttcgacatgtacgcgcggaacgtagcacagcacctcgagcaggtgaagaccaagtaccctgtcattgtgctctccttgaaggcaagacgctgaacctatccgttcgtcggctcgtggtacacgatgttgcattttataagtagcgtgccagtgtgtgttgttggggaccgattgatcacccagctgctctgcaaattgggtctgccatagcctttgtctagctttgagtcgtttgtcgttgtaagttaaatgcgacgtgtgcgtgagtcagtaaaagtaaaatgaactagcccacgcgaatacgcgggcatgtatcttaagttgtgtttatatgggtagaaaattaatctaattatttctatcttgattgaaaagtatgatttctctaaaattttacttatcaatcacttggattttttttccaagctatatgttaactttatactttgtactctctccgtcttatattataaatcgtttgtttttttttctagtcaaacttctttaagtttgaccgctgacatgtagggagaggagaatgaagagttcgctgctaacatgtaggctccactcgtcatgttagcaaaaaccggccactataccatcgaaggactaaagttgacacggtattatgagttgagggatgagttatacttggtatttcggtttagagacaaattataacctggatgataaattgagggatctaaagtgaacttattcgaaagtaaaaaccagtgaagaaatttgagggctgccagatccttagatggaagcctgcgccggtgagccctggagccgtgggcttgaatgttgatggtgcattactttcccaaaaattgatgctgtgttttaacgttatttattagatatattaatggtttattagtgagagttcgaaaacaaatgcatggagaaaacgttagaaaccatgtgttagtcagtcactcaccgttgttgcagcaaacaaaaactaccagtggtggctcgagtcaacaacaacgcggcgaggacaaaacatttatcggctcctgaaacttcggccatggtggtgcgcagatcagcaggtatccagatgcaatgatctaaatgatgcatcgcgcgtgcgcccgcgcgcggttgattccgtcgcattcggtgggggctcgtctagatcacgtttctggagagctccagggtctctttcggtggattcgactgttggtgaattgtgtcggcgactcggcgtcacggccgcactgctttggctaataagcgcactcctccaactcaggccgaattcagttctaaacttttttttttaactttcaactttaacttttctatcacgttaaaacttttctatacatataaatttttaacttttccatcacattgttttaattccaatcaaacttttaattttaacgttaactaaacacgcccaacacgccctgatctacgaaaccatccatccgttccaaatcgcacaaaaaaagcaaagtcatgtggtgaagccgctgtacctgtacgcgaagcaatgaaagcacacgcccccgtcttttcccaaagacgcgagctcgccgctgcgcagcatccagattccagatagtactattggcaaagcacaggtttggggcgccatgggctcctaccactacacctccacctcccacttcttcttcgccggcggcggcgagggggagtactccagctacaagggtactggtagcaccgacacccacaggcccaccaccgtgcggatcccggttaccaccccgggcccggagcggccgccggacgacgcggcggcggccaggatccaggccgcgttccgggggcacctggtgaggaggcacgccgcggccgtccgcggcgccgacgacgaggcgacgcggctggagcggctgctccggaggcaggagacagtggacgccgtccgcggcgacgagcgcgagcgggcgcggttctcggaggcgctcatggccgtgctgctccgcctcgacgccgtcccggggtactacccggccgtgcgggaggcgcgccgcgccgtgacccgccgcgtggtggggctgcaggaggtgttcgacgccgtgctcgccgcgcccgacgccgccgacacgtgcggggtccccgccagcctggatcaggtcctcgaggggatctggggagagtcgccggctgcgccgccaccgccgccgccgccgccgccgccagcggcggtggaggtggaggaggaggtggtgaggagtccgtgctggaggagatttttcgggggagtgtagcaagtggtgtaaactgtcaaaagtgtatgcaaccgaatttgttgggaaatatgccggaaatatgttggtgtgtacctataaagtattaaagtggtgtagtataatgctatgaacaatcacgtaacatagtaaataacggattaacaacatgcttgttttgaatcttacatatctgaacatttgcaatctacttctatccagaagaactggctaattgggtaggtttatttgtccagtctgtagttctgacacatttgcaatctgaactcttctcttcagctctggaagaaaaagggaatcagctagggccgagtttagtttcaaactttttattcaaactttcaaattttccatcacatcaaaactttcccacacacaaatttccaacttcgtgtcacatcgttataattttatccaaatttccaactttgatgtgaactaaacacacccttatcctccctgctgagtgctggttctgtatttctgacaaaaattgttggatattattccactctcatcgtacatttcgttgatgttctggcgaagttcaaagttctcaaaaaaattgtccagtcagtagtgtaccgtatttgaatggtagtcaggaggtagggacgagtccattttcgaggatgggccttaatctcggcccacacctcacaactaccgtccgcgaggagcgagcccaagtaaagtccctgaactccttttccagttctctctctaagtctaacccaagtacccaactcatctttatgtgcctcaatgaaatgtacgattagagtggattgatgtccaacagattttgtcagaactacaaaccagcgagaaataaaccgagctgattccctttgttctatagctagctggaagagacaactacccaattggccagttcaacgggtaatttctccgttcttcagttaatccatatatcctggaattgtctcacgttcatcaacaaccacccagtacattcctttttccctgtcactatacccatccaggcaaccagctaccaccaaagtaatcttgggtatgttttctctcgttccctgaagttgttttgatccgcatcatttccagtgttccaccagtccacttgtgttgtgccatctctgtttctacggactttctccgttttacaatgtaagtcattctagcattttccatattcatattgatgtaaataaatttagatagatatatatgtctagattcattaacatcaatataaatatgagaaatggtagaatgatttacattgtgcaacggatggagtagttgttaatgtacttcccaaaaggaaaattcatcatcattgagaaagtatattcggaaaaaaattcatcatcattgagaaagcatattcagtgcaattgctttcctttctttttctatcgaatcaagaactgttgatccagcgtaggtaaatggagtaccaattatacatcatcttgcactgagcatcagtgctgtacagtactatataacaagagagaaaattgaagagtagtactagtgtttgtggtccgatgtgttcttacgtttcagatcgtgtggtcctttgccttttgagacgatgacactagcgtaaagatgtaccggaagctagagggagaatcaagcctgtggcgcagcaatggagccgcgaggcatcggtgacgcaacggagcgcgacttatcgccttttcgaagaaagcacaggaggaatgcgacgttcaactgcatatgtatggatggatagattgcagcttctttgataagcaaacgcttggaagcttgtcctggattcacatacaaatgcaggggcctgctgccgatgctgccgggtgaggacgtgaggtagagcagctgcacactgtaggcagattcagattcagattcagatgcgatagcagaagcgcagaactgaacatacgcacaagagtggtccagtccatgcagcttcagaccgtgcatcagtgcatcatgattgtgttcgttgttggggagattatctgccctgctaattggcgattagtggaggcattcgagacaagttggcctataaaattttcatccatgtcagtcagtaactcatcagggtaatcatcatggaatgaaatcagtagagtagatagatgaagggaatcaaacatctctggttaggctaggcatcagtttaatgcctagggtcaaacaaaccaaacagcacggcagagcaagctaaataaaagaaaatttttaaggagtgcttagagaagtaaccggagttgacacggtacagttggccctccaagtcgtagtagtttcgtatcatcaactgataagcacaggattagtcagtcagcgaagcaaccttgcatctatgcatggcttaattatgctagctcctctgccaactgatccaggactccctctactaggacatcaatcatcacatagatgtactgtacgtagttaaatataattagcaggagattgatgatgcatgtgtaacgtgttgattggataagggaggtcatcagccaatataatgcatgaaatcgatgatcaacatggcccggccggtcagaatgatgagctcatgcgcatacaagtaaatacgttatcctgctaaatttgttgctggtatccggctatccgcatctttgagaaattgtctacgttcgagattgataaacaattaagattaagggcctgtttagatctcttggcaaaattttacgctctgccacatcgaatgttgggacgcatgaatagagtattaaatataaacgaaaaaataataattacacagattgtgcataaattgcgagacggatcttttaagcctaaccgcgccatgatttgacaatgtagcgctacagtaaccatttcctaatgacggattaattaggcttaataaattcatctcgtggttttacaggcgaattctgtaatttattttgttattagactacgtttaatacttcaaatgtgtatatccgatgtgacacgctaaaactttacacccctccatctaaacacaacctaagtaacgatacggaaatagactatgattaattgagttttaattattatgaatttgaatataaatttatttgctattttagaacaacttctatatagaggtccttattgattgactatatttttctaacaaactaaaactgtttattaaggaataaaattaatttatggttaaaatttatatatgtgttcttagtgacttaaaagtcaatataaaaaaagaactacgttaaatgtatttaaaatcaacttcaatttttttttaaaaaaattaaatttaaatttaaattttggctctgagcaactaatgggacttagaaagtttgtagtttgaaaaacatgctaacaaaaaatcaatgtagaattacaacttaattaggcgtgtgttttgttacttgtatatgggtagtaacatacacgtccctcgtgtaattgataaagtattacatacgcagtattttacattgtactgtatatataatcgcattttaggggagacaatggaacacacaatgacacaacgtgacaaccagagggagcaaggaaagcaggatagctttacaaggaaaggaaaaggaaagcggccgcggacgccagccgccattccaatccaccctatagaagtgcctccaactgcagtgccaggtgggccccgagaaccgggcccacatgtcatcgaggttctgaggataaaaggcaggtagcaaaacgatggagccaatcatcatagctgtcgctttctttctaccactactgcaaaatcctaaaaaatcgtcccatatcggggaaagcctagcgggtgcagccttcgcccgtttgtccttttatagatatcgggtgaaaaactgaaaacccaactcatttagcactccagttatttttatccttatccactagattgatcccatcaactgtcatcgttttctcggccgtagaccatgttgagctctctgcccgtcctttttctacggtgctaattaagtttagactacaaaacatgattctaacaatttaatattatttaggagtaatatgaagtactctatcaatttcataatgtaagtcattctatcatttcccacattcacattgattgttaataaatctagacatataggatcccacattcatattaatatgaacgtagaaaatattagaatgacttacattgtgaaacggaggaagtagttttgaagtactaaagaaatttatttgcttttcttaacaacttaggagtataaaacaatttgtccattcgtactttttctaaaacactataattcatattgagttttagaatatgattttaaaattaattttaggggagggttttacttagcaactttcatcttattcatgataagaaaaaaaaaactcaagattccaggcttctattggatatgttgcatcacattggttgcaaacgaaaaattgtttgcgttactaatgaagcctacttaaacacggaaaataaaacacgtgattatagtaagattaattaagtaacgcaaacaattaatatgatttttaaattgaaaaatagattaatataatttttaaagcaactttcagatataaaacttttaaaaaagtacaccgtttaataggttaaacaactgaaagggttgagaaagagaagaaaagaacacagcctaaatatagcaggttaaggctaccggaagatttcaatctaaaaaaacattatcaatgcagtttagttttctcatgttcatcaatttaaatacctaacaatacataatttgcagtattatattgacaaatgggcccacttgtgcaacatatatgcttttttcccccgaaaccgcggttttcgcttggttaaggtctaacgggtcaatcaacaaccgtgtcttcttaacgggttggacaccctatccaattaacactcctccccacccatttctatccccattcaccaccgatccccaccaccaccaccaccccgacggctcgaccctacgaccgtggccgcagtctgcagcgagctccggcgccctccctcccctaggtatccccgtcgatcggcggccgcctcccccggctacgatcgccgccgctccgacgaccaccggcgtggtccggcgaccaactccggtgagctccctgctcctcctcagtctcatctaatctcatattcatatggtttccccaacctccgtggccgtcggggccaccatcggcgcggggccgccgacccgagtccaccaccggaagccgccgccgccgccgccgcgctctttctcgtagccgctcccctcaccgtaacttttcttcccgttgcacccggtcgccggccgtcttccgacccgtggccggcggcaccagcaccgcctcgccgccacggcgatcctctaaaccccgatctcccccgaccccaccccgaaaccctaatcctaacctcgccggaggcagggcaggagacatgtgtggtttccatttttggcacttcccaattctttgctagtcttcgctagacgctagtgatgcttcactgcatagcgagaattctgaatggaataatgaagctttaggttagaaatctagttgggacttcaaaagattgtgcgaataccaaacagggaaaaggtcaaatccttgtcctcgttctctgcctccaaacgcggttatgggcttggcgcttactagggattgccggggaagtgggctgttgaaacgatgctacgcgttagagaactgtgggcaagactggctgttggggagaaggggtggaggtgaggcgatgcaacgatatggcaacagatttaaatgaatgggggaattgaatcttttattggtggtactgatagcgtgtgattagatttgaatagttgcaagaactatgggcaagacttggctgttggggaaaaggggtggaggtgaggcgatgcaacgatgtggcaacggatttaaatgaattggggaattgaatcttttattggcggtactgatagcgtgtgattagatttgaatagttgcaatacaaactatggttgccatggtatggtcaatgtggctgggagtggaacagttttgatatcaacttgggggaagaaaagaaaaaaagaaggcatatatttctcttggggtgatgagaattgctataacaactgacaagtgaaagcaacaaacattaccccccatggaaggtatccgtgacacgattgatcaatctacaagtctgcaaatgtaagcatgttaacaaacctggtaatatcccaagacgacgacgaagatgacgactaaccaagtggagaagttaaagtgcttggatgaattagttgaggaaaaataggcaatcaatcaatcaactgcatattgaaccttaataaatggtcacaaaagccccagaagaggaaaacaaccgcaggggtagagaaggaatgagcagtcaaccagcaatagtggaagcgctaagtattgatttctattcactttctcctctagactattggtggttgagagtgatatgtgagggagggaagccaacaaggtgaacaaagaggaggaaggggaaagaaactagaggagaggcaattgaaatctttctttctcttttgcttgccctcttttgaatcaaagttcacagctttcacttgtcaactgcagcgcttctcgcttcatgatgaaatctattcccttcttcgtttctttttttgcccctcaagttaagataaaattttgcttcctttttgctctcaggcacattaaccatatgtgccatgtgttgtttgtacttcaactcttcaaatgtaaaaatgctctatcagttctgccaatcttgtttaattcgtgcattgcaaacgtaacaaagtaaaaagattcagttttccccatttgtttatttcaatctgttataggtagggataatcctaatgctaaaattagctcatgataccctctgatatgcaggcatcccttcggcaaatgtggtgatggaccgaccacaagatcctttcaactcacgaggtatcatgacatgtactccaccttccaggtaaacggtgttttgctctggtaaactggatcttaatcgctgtccctatatgcatttgtcttgttccagggattgcagttccccctgcagtcaagatgaggaacatggctggaaacaacagtccatggatagaccctctgccaccaccgatgaatgcgcgcaatgggctggcaaatgccagcctcttctccacctctttgccagtccttcctcatgaaaaaagtatgccactttcactcataagacatgtcatgctctagtctgtgcatgtcatgctggaaatagcttgctgtccaaacaactgatgtgctcattggtgcagtagggtgtttattttttattttttggctatagtactgtagttacataggtatgactgagggattttaattgtgatgtgtgcaaagcaaagttggaagagggaatgacactagggaccgagatacgagggaaggctgcaaatggaattagttgtgtccaaatgccaaatatgtggtttcacaccaccatttattgtaaaaaattcccatctttaacatgccaaaaatcacatgaatccaaccttttcttctgtaatgtaatgtagcactggctcatatccatatattattatgaatatagcttgaaaagggggcaccacctttgctttggaggcctagaaattactacattaatatgagaaaaaaatctaagccgttagatcattgtgggaccaaattataaccatgtagattgatagcaatagtcgtataaaaagtaccattgtgtatatatagaatccgaagaaaagagttgtatattgaatccagacctacttttaatatctgctgtatataaagtataattacatacatgaaaataggagctaagagctctatagcaaatccaatttaactaccccgtgcaaaattgtgtagggaatttccctagtttgtattgatattcctgataatgtgtgtttccctctttcagtcaactttcttgattctgcacgtggcaccccattgatggatgatgcttctgcaaaactaaaagagctcgatgatgaccctgaagggaaggactacaagtttgactttgatctccgccaaatcgatgatttattgcctaatgaagatgatcttttcgcgggtatcacaaatgagattgagcctgctgggcagacaaattctatggaagaactggaggaatttgatgtatttggcagtggagggggcatggagctggacacagaccctgtggagagcatcacagctggtttggggaatacaagtatagctgatgggcttagaggcaatggggtcaaccattttggtccgtcaaatagtgccagcactgtggccggggagcatccatacggggagcacccttctagaacattgtttgtgaggaacatcaatagcaatgttgacgacacagaattgcgctcactttttgaggtaataactgcaatgtttgttagctttatataattattgccatctgagattgatttgttagtgttacttatcagtaggtataccttgcaactgaacaactttatgtgctgtctaatcaactcatagtcagtgttatgtctgcacttctcttataatgtatctcagttgatctttacaatatccattattgtatttcagcaatatggggatatccgaacactttatactgcaacgaaacatagaggttttgtgatgatatcttattttgatatccgagctgcacgtggtgcgatgcgtggattgcagaacaagcctctgaggaggagaaagttggacattcatttctccatcccgaaggtttattatgttatggttcactttcaaatgcttagtccctttaccataaagtacttagcagtttgccatgttgattttgtaggagaatccatcagataaagatttaaaccagggaactctggttatttttaacttggatccctcagtttccaatgaagaagttcgccagatttttggaacatatggggaagtaaaggaggttaggatgttacttccaatttttccctttgaaatatgtttttgcttgaaaattgcatgttcttacgttcttcgtatactttgtttctgttttttggaattcaatctgatggtgttagtttctatccacagataagagagacaccaaataaaaagcatcataagtttattgagttctatgatgtaagagcagcagaagctgctcttcggtcactgaataaaagcgagatagctggaaaacgcataaagttggaaccaagtcgtcctggtggaacgcgcagaaagtatgattatgcgttttctttccctatccatttatctgtcatagtcttgagttgttgtttgcactttgcagtagaaccctactgaatttatacaccaattttgggatgatctattgatgctgcagttatgttgatttatctgctgtatgcaaatattttaatgtatcaaattgcactatttaactgaccaaggcatgcctgttaaggcttttcgttacatcctcgtgatgctattagcaatctgattgttttaatccagttttatcatttcatcagcagtagaatacctcagattcatcctcagttgattggctttcatttatttcaacgaaatacttgcagttttgaaagtaattagcttgttgtacaccctgtctccctgatttatttaatgggcagtgcactatttcctgaaggtatattttcaagcttgtggatatgctcatttagtcctaggattaatttaagaaaaatgcttaatgacattgaaagttcacacgtaataccattgagagtttgcaccgtttctttttaataccatttccgtctacttaactaatgtttccattaactcagactaaaaataacccttgtgaaccacactcacctcaaccatggagaaagctccaactgcaccactgattgttgtcattggacaccgtttcccatcatctgattcccacagtgggccaccaattcagagattcactcagacacatgcatagtagtagtgatcacgatttcatgagagagggagagggagaggcagggcacatggtggtggccattggcgatgaaatgattgtagatagtggtgcggcaggcaagtgtgggttcagtggttaggaggtcacccagggtgctgtatatgccgcgcaaaacaaatcacgctcatcgccaagggagtggatggacaaacagacaggttgagcggacaggtcttgtctctttcgtggctagagctgctctgctttccgtctcttgcatttgatctagcatcgtcattttcaattgcctctcctgctaggaaaataaacaaaaacggaaaaaaacagaaaaaaggcaaatggaggacaaaaatggtataataaatgatcaaatggtacattgcaaattttcagcgctattaaagtttattatgagctttagtggtacaaatttgaacttgagaattgtttatgccatggaaccaatctttcctactgtttgagttttggaaggcatgttttttcagttatcgtgcaaaccaattatcattgacagaatgtttcactttgttaacactgatctgatttattctcattttcttctggtttagcttgatgcagcagcttggtcatgatatagaccaggatgaacccagaagctacaggattcctcatgttggttcacctattgccagctctcctccaggtactcggactggatctactttagggacatttaatatgcttctgtctatttgtttacaacttatgaatgttaaatcatctcctgtcaggggcatgggctcaatacagtagtccaactgataacaatttgttgcaagcattcaatgcgtcaccaactggaaatggcatgagtcctattgggatgcctccttccttgatatcgaatgctgtgaagattgctccaatcgggaaggatagcaactggtctaaatatgacaaagtattctcaaacaacaaccagccccacggtgctgcatttcagcattcccattcataccaagatcacaaaagtgaacatatgagttcaagtcctgggactttaacagggcctgagtttctatggggtagtccaaagccttattctgaacatgctcaatcccctatttggcgtccaccagcaattggtcatgcaataccatctaatacccgttctcaggggcagggattattgtatggtggccgtcaggcttcactttttgggtctcaagatcagcttcatcatcatcatgttggctctgccccttcaggtgctccatttgagagccactttggatttttacctgaatcaccagagacgtcttatatgaatcaagtcaggtttgggaacattgggaatattggtagtggccgaaacggaactggcctcatgctgaacatggctgctcgtgcttctgtaaaccctgtttctgctttgagtggaaacatgtcagacaataactctagtagctttagaccaatactatcacctagattgggacaatcattttacgggaatcccacatatcaagggcctggttcttttggacttgacaattccatcgaacgtggtcgtaaccgccgagttgacagcagtgtgtttcaagctgatagcaagaagcaataccagcttgatttggagaagatccgtaaaggcgatgatactcgaactacattgatgattaaaaatattccgaacaagtatgtatgtggcttgatattgcattttcttttctgatcttacattactacatagttgctcagctcctaaattgttaggtacacttctaagatgctgctggctgcaattgatgagtttcataaaggaacctatgactttttctacctgccaattgatttcaaggtactagatttgtattgtattgtactgctgtttgcagtgacttgttttgatgcccagcagaatttaattatattttccccacgcagaacaaatgcaatgttggctacgcgttcattaacatgatatcacctgtgcacattgtatcgttctaccaggtatgtccatttcttttattgactcttgcatgctacacagttctttaattgatatccatcaacatgaagttcgtggtttatgtttatgtaagtttctcctaaatatgtctagctgagttgcacaacaacctaagattactggtagacttattcggaacaatttgtaatgatctgtttctgaatatgtgctgtaatttgcaggcgttcaatggcaagaaatgggaaaaattcaacagtgagaaagtagcctccttggcctacgctaggatccagggaaggactgcactcatttcacatttccagaattcaagtttaatgaacgaggataagagatgccgccccattctttttcattctaatgggccagatgctggaaatcaggtaagcttgtttaaaatgtcgacacacatttgtccgcttgttcttatgttcaaacagtatatcgaacaaggtaatggtgatttaactagcaaactgcatcttaggttataagcgtgtttctaacaccatgcatgaataccaggaaccatttcccatcaacggcatatgtatccatatgccactggaagatggagcaattgcaacaggggatccctttggaaatgaagaggacaacaatcagaacgagaggacagcaggagaagagttatgaccattgctttggagtcgccgataaatcttaactgcctagagaagagttttccttcccaaagtgtatagaagtgagaaagattggttagctgcgaaagtttgtggtgtggcatggcgcatctactagttttttttgtggcaaacgatgtcgccccctgaagaacaaaaaagtgacttggagttgagagttgggagtctgctaggtctctctctccatgtcttcctttcaagtttcaaccccctctgtacagatagatgtcgggagttgataattggtcgcatttgatttggtgtaaaaagagagtggtaccggtcaaactgtacagttttaaacattttaatcctctatgttttaggagacttgttaactctatgttttatcctgtgtgaactgagactccaaacagggttccaccttcctgtctacaaaccaaaaatcttgttatgtgcctgctttctgatccttcttccctgtcttgtgaattgtgatactgtgcaagcagagaagcacaacccaggcaagaaaggaaagtgatggctcctttgaaactggaacgtagatattttaaagaattcatgccgaaaacgatttaaatctaagtacaattctttcacaaatcatggcgaaatgagtacacaaggcgatttgaagcgaaaaggaaattcagcccagcctccaaaagcccactagcccatcctgcactcctatctcccaatggcccacacagaagcccatccaaccatccaacggtatccataccgcctcctaacccgcagcccgcatccacgccgtccatccggtctccactactccacccccggacccaccaacccaactccgccacccaccaaccgaaaatccccccacccccgaaaaaaaaagaaaagaaaagaaaaggagaaaaaaaaaaactcccgtgctcggctgcgttctactactagcctacccctatctctctctctctctctctctctctctcttctcgctagtcttcccccaaaaactccacccttccgcggcctcgcccatctcaccgccaccatctatcggctccctcctttctcgtctccaaactcaactctaattgagcgcgaaaacgtggacgcgtttgaattgggcgtctccctcggcttccaggaccttctagaaccttctcgaggctcccccggcctcgcgcggtcgcggctctgcctcccgctctctctcctagggttttccccctcctggtcgcgcggcgggggcggcggccatgggggacgccgcggcggcgtcgcccccggcttccctggggaagcggcggcgcaggggaggagcgggcggaggggacggcgaggggctgcggcgggtggcggagatcgtgatggtgctggccgccgctggggaggtgaggggtgggagggagccgacggccgcggagcgggcgctcgccgcggaggcgagggagaggctggctgcggtcgtcacggagggggcggtgcggcccaaggatctgttccccggggaggccgtgcgcgccctcgtcgaggatctcggcctcaacagggccagggatcccgccgccatggggttccgcccgcccaaggcttccatcgccgacaggctgatgctcactaagcgcaaggtttggtaactctcattcttttttcgcttcattcagctttatagctttacgatgaactagcaccattgacgaaaactggaacgatttggtctatactctatgctgcgttggggagaatgctcgtgatattattgaattgttagcttagctatatcatgtgaatgctactctcttgatggtttatattgattgattttctagaaaacagctcatgtactggtaagcttctgttactcctgtttaactttggtctgatatggtttgtttgccttcctagtgttgctggcttgttgcccactaagataatttactttgcttccccgtgttttgagtatatattcgtgttaagtgatggaggaaatcctttatatgccaatcaaaattcatgagtttccttatgggaaaatcggttccataacaccggaagatcctgagttcacaaatataccatataaattcatcggtacacttcaatactatccaaagttttccatggttgggcatataccactctgttgcctcttttccgtttaatgatttttcttctgtcaataatccgacgaaaaagatggttttgtccttacaatggatatgtctatcctgtgctggattgacactacatagtgaagcagcccactggcctggcatccaccgtacttgcgttcgcctctgcagcatgctggaggggtggtagcaggggcagaccgactgcaacactgtgtgcccgtgccaggggagagcatgcgcgtgcttctacagccacattccagtattcctggtggccggtgttgtcccttctactgctagccatcggggctgctgtccagcacaccaatatgcagaagaatcctcctaggggtggccgccgcgggtatttcttgacccactttagttcaactaaaatgaactaagtttcacttttagagagtctaaagtgaaatttagttcatttagtaggactagaatgggccaaagaatacccatgggtcaacccacacccatccctaaatccttatgcgaagcttagtgagaagtgaaggggagagagagcgagggtagttttgccacagattacggtaaagtgcctccaactcaagaaatggtaaaaaaactaaacaacacaaactttggatggtattaaagtgcaccactaattttcagcgatatactatttctgaagtcaggttcttctgatgccgcgaaaccaattctttccttatatgccactgtaaatttgctatgaaattacccatgttccccctcctttccttcttcaacctcatgggagttgattgcatggtggggtcatccatcagcgagatgttgcgaaggatagcgtcaatttcctgtggctgctacagctgtccagcgagatgtagtcatgtcagagcttgctgatattacaagtgactgcgtggttggatcttaatcaatctactccctccgttttacaatgtaagactttctagcattgcccacattcatatagatgttagtgaatctagacacgtgtgtctagattcattaacatctatataaatgtgtgtctagattcattaacatctatatgaatgtgggcaatgctagaaagtcttacattatgaaacggaggaagtaactatgtttggaagtctgggtacaatccacaattgagcagacaagcactaggcctggcgcccctcttgtccctttgtcagtttcatatatattggtccttccctctgacaacccctttgcccaatcccagcacttcatttgagtctgcttgctctcttgccttttttcttggcctctacgatactatgagagagcaggactgtggagcacacaacacatggtgggtggtggggaagctgtgattgactgccagccttttgaggggcagctctacagtacatagcactctctggctccctctctggcaggagggcttcttcatcggcgatcttgcagccatgcagatgggaagcatgtgttgcaagtatgctgcttctcactatgagctttgattggcctggtgatgagttaatgcatgcatggcatgttgtggaagagcagagtggtgctggcctgtgccgatgggggcccatgcgaaagtggattgagaagaagagaagaaaggaggggatgaagacaaattgtagttttgccattattctgaaggcaaaaaatatcatatgccactctttagtttctcattctaggatttcccactcttctagatctaattgataatttgccactcacttgatgtggttgatctatgaatttccacttgatggcatataagtgaatctggtatgacaattttcaagtgccatataagggaactagtgaacttgattgccagattaagaattttctctaagtgatgcctttctattttcataattgtaggagcaacatgaatttgaacttagtgtcatcataggtttgttttggttacgcttactgtttctttgtatgggtttcttcgaattcactttattattggattgatgtgatcgtacttctcagcattgagtggtttcacttagcctttcagttatgaattatactcttttttttctgaattgagtctagttgccaatttatcatcgttagttaactattatactattattaattatgcaaaaataattttgttgtagtctggtgagttcaccctcattgcctggtctatgcattttatttgtacatctgccaagttatcaatttcttttcttcttttaccctaattccagatggaagaagtcaaggaatctccagtacagccaacgactagtacagctcaaacaatcacttcaagtggcacagctgatttccaaggttttcatggagctcccaagtttgctgtcggagttcctaggaatctaccagctgttgctgccttgcctgctactgccccagtgacttctgcttccctggttaccttgaaaccacctggatcatctcctgtaaaatcagttaacaacccttcagttgttacaatgccccatatggctccatcgcatcttaaatcggataaaggagttaatggtcctcctaatctagtacgcaccggaggtactgctccaccttatctacaccatcagttatgcatttattttttgagcattcacttttttttagagtaaatttcacaaaactacgtattttatggtccaagttgcagaaaaccacatacactttgacacttggcacttaagtacatatattttggtagtgtagtttcacaaaaccacactatcaatgaatggattcacccgcgagatgatgtggctctttcacataggacgaggacatgacatcctattaccagccatctcacgaaattaataggatataccacgtcatcatcctagatggagcaaccacgtcatctcacgggtgaatccattcatcgatagtgtggttttgtgaaactaaactaccaaaatatatgtacttaagtgtcaagtgtcaaaatatgtgtggttttctgcaacttgaaccataaaacatgtagttttgtgaaatttactcttttttttattaattcctcattccatctaattctaagtaagatgcttgctttggtcttggtcttctggaatattgtttagagcttttgggtaaagcctcatatgtaaatgttctactaccattcccttcagattccagaccaagagaagtatcccttttcctggacctggagttgattattcagaagcgcagaaacaaacctgaaattcaacagtttttatgatttcaactttggacatagaaactattaagctcttctttatgtatcatttatatctttcttaaacactcttgcctagaagaatttctttcttgtgtctcaaaagtactttacatttataattctgattatgaaaaagagattcactttgattctcctagctcagaaactaattaggtgtatttccccctgcagcaacctatggcaacttgaacaaatcatttcatgatacatgtgctaggtccaatctgaacgctgtacagagttccaatccggtggcgaaaaatcaggacacaaagacagcatcaattgatgctacagcaggaaaccctcttacaggtcatcatgctacaccaagcgtggcacctgttcctccaaaacctacttttgctaaccacagtgaaatagcaaaaagtgttcaacgtgttctgcaccaaccagctaatcatcctagctggattccgccatcaactgagtacatgcgttctcgtttggactgtcaaatatgcaaagtagctatcatggatatggaaagtttgcttgtttgtgatgcttgtgagaagggagcacacttgaaatgccttcagcattatggtaataaaggtgttcctaaagctgagtggcattgtccaacatgcctgacaaagagtaagggcaagcctttgccaccaaaatatggcaaggttacaagaactgctgtcgaaccaaaggctactccaccaccagctggaacgcaggtttcttcgcaaggagcggcagaaaatattgctgtaaaggaaaatcaccaaaaagtggctgtaaatggtaatcttctgaatcaaaactccacgcaagctggcagtgttgctcagagcagtactgttttggctctaggtgttactgctgctgttgcacaatcacagccgctttctatatccagacttccagaaggaaatttaaataatgatgcagccttatctagtgaaaagacggggaatgtgggtccttgcagtagcattgcacatcgtaatgaaaagccccctgatgaactacagagcagtggactgcctgctaacagtaagactggaacccaatcagggaaatctcctaatgaagaagtgtccagtgtattagtttcaggcagtgcggattcaacaaatgataccttgcatgagcagaaatctcatgaaatttctggggaaaaatgctcagacaactcttctattgttgcttctgaagcaaatatcaagtcaaaagcagactctgagctcatttcgggcagagatgtggaaatggttgataatgatataccaccaaaggatcaaaccaacaacattgccactgaggacaaacccagtactcaagaaacctctgaagcacataaaatggaagttgtggaggtgagcgccaatactggaatacaaataagccagggtgacagtgctggcactgaagagaatctccacactgaagtaacttctgttccacacatgatcaatgatgtggcaatggctaccaatgctggaacaccaatatgtccaagcaacaacgttgccattgaagaaaagcccaagtctactgtaatttccgaggtatgtacaaccaaagatacggaaatgactactgatgccactttagatcaaaacaccaatgttgctacagaagaaattcctttgcctgaatcaatttctgcaactgaggatgctgacatgactactgatactggaataccaacaaatcaaagacaggaagtaaatggattggctgaaaatggcagaaaagaacatcccctgggagaaacagataaacacaaatctgaccatagtacgatgcctgatatgtctacagccccacagataacatcaaatggagttatgcattcaaaagatgaagctgcatgtggccatgaaggtgaaattgtggacatcagtgcagcagcaacagaggaaaacaattagattcagatatagtagattgcatccaattccatttgcaggtgtgttctaatctaaccagttatactttatggtgctagattgctagctgtattaataattctttttccagtattagtaaaggcttctttgaaacacaggattctgggatggaaggagtacttcactatgaattcctcgattccaaaatagccttatattggttgttccctgtttatttgacttagggtcgatgctatctttaaagcgatactccacatttgaatgctgttttatgcgtttcaacgatgtcatccgtaacatatttactgcctagtggacctgtcacctgttagcgaatattgtgctcgagaccttgagttatctaaccattatgcagtgctgctagtttttgctcaaattctaagagttaaaacctttgacaggcatatcagaaattcaacaatttgtacctgaccctatattcaattatttttacagacgcgatcgtgatgaagccacctgtagttcggttagtgcctagcgtagcttcagtgattaaccatgctgtcaacattcttttggaccagtcaccataagttcatcatgtgctgccggccatttcccatgaggtttgtgctacgcctctacatctcttaaaacctttcattcaaaattaaatgggcagctggtctcataatagaaactatgctcaccagacaaagcccacaatttaatcacttcaaccaacttatctttttttgcatttctgttgacatgtggtttcttttaactcgtgcagtgcctacttcctactggacttgctggaatcaatgtagcgcgcatgaaggatgttgttaccttaccgtagttccttcggctatcactcctagctatatttagtttctttacctgtcttgtcttcctctgcgctgatcttataaaggctgtaattacataggatttggttgagtgactcataggttctgtcgtaatgatatgattttttaccgtaaagttcatcaccatcggggccagtgcaaggtgcactggtgttctcgattgtttgatatacccgtgaatctctgagctgtcttacaaccgagtgtttcgcccagatttctcaagtattccagtttttggccggttctgaagtttacctgaaacgagcgacctgagaaggacggggacacgttcacttgggagttgtgatgtaaactggttgcgagttgcgacgcgcaacgtgccaggttagtgtcacaagatagctgcaattacacatctatcttatttgcatttctactcttccgagacttatgttgtgcaattgcaaatattatatcatcaatattacaccatatatgtcgccatatgagacatcacccataggatagccaaggtaactaacgttgttacggccggtctgactgtctcgctacgagcctaagatatcacccataggatggccaaggtaactaccgttgttacggccagcctgactgtctcgctacgagcctacgaactagtaagatcagaaagtcggtaaatttattctcgaaagtaggctaggcgaagatatacatggtagaatacaacaccacaattgacagatcagacgaaacacaccgtgctccactgctccatgttcatatggccaggaacaggaggcagcacagcataacgcacgtccgcgacgtggcgactccgcggccgccgctggacgccaacggcgcgggcgccggagcggcagctcggtcgcccttcctcgacgaccctggcggtggcgtcgtaccagccaccggagcccgcacgtcgacgcgcagcttcagcccgccgccgcacttgtccgggtcggcgctgacgaagtacctcgacccttcgccgccgaggtcgacgcggctgagcccctccgtgtacatcctgacggggctcccggcgtcgcacgactcgaactcctcctcgccgccgacctccgcgacgccgccgtcctccgccgagtacgcgaaccctgacaacaacagcaagttctctgaaactgaatactgaacagagatcgacgcatgcattcgtcatggacttacagagggtgtctccgacggtgaagagcctgtccgcggaccaggcgaggacgtcggaggccaccgcccaccccgggtcacctccgacgacgtggtgacgacgtgctccggcggccgctgctgctccagcggcgacaaccagaatgagaacgccagctgcggcggtggcagtcgtgacggagacgatggccatgtcgtcgaacgaatcgtacgcgcgcggcacgaccgagtggcgcaggagggaggagcggacgcgcggtatggtcgatggatgatgacacacggtcgtcacacgcatcgctgctttagattggatcaaatgtctcgaaccaaccagtcctctctcctctcgatcacgagaatggtaggttcaaaatccataaaaaagacggagagaatgttaggttaaaacctgctgttctgttctggtaatggccatctcctgctttctcctttctcccagtgatgcaaggcgcttgatttgctatgcagctaatgtgcagtatttgactaaccagcgaattccaatttgttcgatgctcacaacgctacatgaactagcagacaaacacctgaaaaagaacacgagtactagtactcttgagtattgaagtctcagagaggaatacaggggaaaaaatgcttgggagagatgccatgccgcgctatgttgttcaacttcaaacaagccattatagaacgaaccagaaaggtcattgggaatgcatccccgcttctggacgagtcaagtttggtcaacgtcggactgccaacaaggccatcggatgatcgcgtcgtcccatcggacggtcacgaagccgccacgtcgcgcttgtcaccacgctggccactccggactcgtggactccaccgcagcagcagcagcagcagcagcagcagcagtgaatgctactctcgctctgctactcactcctggcgccggtgacctctctgccactccaccggacggcgacggcgaggcgggtgagctctctcgccgcctccggctctcctgccaccgggcctccacattcggcgtcgcactccttcgtcttcgcgtgatccggtaagccgtcgccgctcgtggcaacggagatctggttattttggtgcttgatgtgtgtggatgagctgagagtttcgtggattagtggagtctaagagatggccttggcttgggtggtgggattggcgcgtcgcggcggcggaatgcgcttgtctgtctctcgacccctgatttggttagtctcgatggttccggtggttttgttcttaggaatttccgaagaacttcatccagttgtcgaccaatggcgttgtttgtagttctagatttggtccagttgcgtgctcggtggagatgatctcgatgcagagctatctccatatgaattatcgattttggttgcgtttcacggatggatttgtttaggtttgagataaatgttgttggcctgttgaaactcccaggtattgagctgttttgttgttgttgttgtgtgcggcagtaattaatgttttttcccttgggccatcagctgtttctgcgattggcatttaatagtatttctgtcaattggtgggggagatgtgatgctagaacgatttaaaatgctagtagttatatgtgtctcttataatcatatctgaccaattcaaatgctcagcctggcagatcgggatcgactaagcattggcctttgcaagttttgaagtgcatttcaccgttgcttttgtcttgagcaagagtttatagagccatacagctccgacaaaaggattcacctattccagaatgtctgctttgctccgtgaaacttcgtgtggatcattgctgcaaaaactgcaggtatgcgtgtgaactgctccatacttgttcatgtcataactcattagagatttttttttttgcttgtgtatttgtgttcaagtagaggttcttcttttctatttttgaattatcagtcggtatgggatgaagttggtgaaagcgaggaggaccgcgacaaggttctatttcagctggaccaggagtgtttggatgtctacaagcggaaagttgatcaggcaaccaaatcaagggatcttcttctccaggcactggattactcaaagacagagcttgctaggcttgcttctgcccttggtgaaaaatccatagatataagtgtaagtaaatatgcgcgtcttcttccagtacgcataggctaatttcagtctgaattaatactggaaagaatgaggcaggcacgattcactaaaattttcagtattcaaatatgagttgttgaaatactgactactgatccactttcgtgttgttctgtgtcattgtgtttcttgcatcttgacttaccagttctgccatgctagagtatgtttggtgttgattgctggcactattagtacttgcatagaagttcagtaaaaatgcagttggttttttagtaacggtgtgcaagtcctcttgaaactgatgattatggttaataggatctggcattgtagttcagaagtcagatggcacttcacatgtttgctaaattattatgcttaaatattagtggatgcaaaagtgacaattttttatctgtacagcctgagaaaacagcacggactatcaaggaacaactaactgctatagctccaacacttgaacaattgggcaagaagaaaaaggagagaataaaggaattagctaatatacagtcaagaattgagcaaatacgtggtgagattgctggtactctggagatgggacagcaagtggcactaccacagattaatgaggatgatttgacagttcggaagcttcgagagttccagttacagcttcaagagcttgagaaagagaaggtacaaactttgtctgtttcatttggttttcataagtaatttatattgcttggtgatctctgtgtttttggtttcatagagactataatatatgtttccatgaatatcacagagtcgtaggctggaaaaggttcttgagcatgttggtatggtacatgatctatgcaatgtgcttgggatggatttttttagaacaataactcaagtccatagcagtctagatgactctattggtaacgaacacaagaacataagcaatgaaaccctgtcaaaacttgataggaccattggtactcttaatgaggacaaaaggttgagacttgagaaggtaactcatattttctttctttcagttttatacttagcaaccaagagccattcttatcctggatctcatgtatgatttatactgtttattcagcttcaagagcttgccactcaactctatgatctatgggatcttatggacaccccggtggaagaaaggagcttgtttgatcatgtttcgtgcaatagaacagcaactgttgaggaggtcatggttcctggtgcacttgctgttgatgtgattgatcaagtgagtcacacaatatactaattggtcttttattggaccaccttcagcatcccttcatatatattttttacttctcgtttgattttgatcttcattacccaatatttcaggcacagactgaggttgaaaggttggatcagctaaaatacagcaagatgaaagaaatagcttttaagaagcaagccatactggaagatatttatgctagcactcatgttgtattagacacagcagttgcccatgagaaaatacaggcactgattgagtcagggaacatggaaccttcagaactgattgctgacatggatagtcagatactgaaagcaaaggaggaagctctgagcagaaaagaaatattagataaagttgagagatggatatcctcatgcgaggaggaaagctggcttgaagactatagcagagtatggttgttctgactactagtgaaacgtgttatcccacctatattctgaagctatgaagtactgagcatgaaattccttttgcaggatgacaacaggtataactcaggccgaggtgctcacctgaatctcaaacgtgcagaaaaggcccgtattctagtcagcaagattccaggtgcctactgtgatgcataagtaaatagttttggcagtaaatgataattctaagctttacacaatccaactcaagaagctctgcatttgggcataatgcaggataggctatatcttttctcctgtaaatattgtttttcctgttcgttgctaatgacagcaattttttttagcccttgttgaaactctggtggctaagacgagagcttgggaagaaaatcacgggctgccatttatgtatgacggtgtttctctgctagcaatgctggatgagtatgtcattcttaggcaagagagggaagaagagaagaaaagaatgcgggttagtgacacttcctttcttatactatcagaagctccttagtatcgactggatattgcatccaaatgcccttgtcaacaaggattctatggtggtgctacttatccacgcttcgatcaatcaaatgatgagtcagatgttgcaattggcatcaaaatcatctgttctatttctttcacattccaggaacaaaaacgccagacggaacagctactaaacatcgaccgtgaggggccattcggaacacgggtcaatccctacagagtgaccagtgcaaagaaggtggctggcacaaagccaaacggtggcgcatcaaacgggacaccgagtagaaggctatcaaccggcaatcagctgaacgagagcaagagtactggccggtctgctggtaaggatgacaagaaaggcgcgtcgaagaacacggcaacttcactgaacgaagcagctcctgcagacaaggaagctgcagactcatccaccgaaaacttcgacgctgatccggttcctggctcgacatgatctcgatgtggtacagatgaatggtgatttctgtcttttttgacaccctttattgtgttcgttgtagtatcttgttgttaggttttagacctgtcgtttctttctgttgactggtggttagtgcctgagtggtgttcaaacatatgggcggtttatattagctgtttagctctaatcttgccgtcagaagtaaaattagcctctcgtaagttttattggttttacaacatgtctgttcagtgcaacattgggtccggtttggtatgaccttggccctgttctctctctctctctcctctcctctctttctactctctccaccttttagccttgaattagcccatggatccaaacatgcacatgccaccctagactaatgtttagtctaccaattcatgactaaatattagctctcaaaattagccctgggctaatcttccaaacaggacccttatttaacctggcaggcgggcactaattcaaccctttcccaatgcagaaatcttaaattgatatttcttgaaaaaaattcttaatcgcccaacacctaaaactaaaataacacagtgtatattgttttatctaaaacttgtgtattatcccatagcaatgaaaaataaccagtacggagtactagcactatacttcatcaaaatgattagcttaagagtcatcagcccatacgcaatctcaccaaccttgtacgagtacgacaccgccataactgccgagacgatcccagccgtccaaatccacatcgacggctcagtcttccttttacccaaccaaatgccgaagttttttttaaaaaaaaattcccagaaagccgaaaagctttgcgttagaaagaaaaagaaaaaaaaaaagaaaaacccaactccgaaccctttcttttgctccaagcgcgcgcgccgccactggactaccgcaccaccaccaccggccgatcgagcgcggcggcggctgcggcgaggccggcggaggaggcgagatgaggaagcgggagagggagaacccctgcgagatctgcgggcactaccacaacagcgaggaaggggagcggtgcggggtctgcggccaccggtcggggccgatggccggggagcccccggcgacgctggacccggccttccccaccgaggtcctcaaggacttcctcttcctcggcagctacaacaacgcctcccgctccgaggtcctcaagacgctcagcatcacccacatcctcaacgtgcgtaatgtgttgcccccctttctcatgatcccaatcgctcctattttgacttgtttttctgcgtgatggagttgaggcgcgatgtcatgatctccccttctgcgggtgagaatattttttttttgtgaagtatctctagggtttggggactattggttgtaagtttatcttgttgtctcgaagaagttgtagagtgttggtaaggtttgatgttgacagggaaagggttatcatccattggtcaatacaatgtggtcgctcctatcgctggtagaaaagttgcaacaaggaagaaggatgggatgtgttgattgcattgtcacagattcctgtacatttgtttgatggtatatcatgccctcatagccagttctttttctcaactccaaacttcaacttccttgttatccgttagcacgctttttagactattaaatggtgcgtttggcaaaaagtttctatatagaagttgttaaaaaaatatttttcaattttataatagttaatacttaattaagcatgtgctaatgagttttcttgttttgcgtacgctgaaaatatccctccaaacaattgaatcagacggagccttacttatgacctgccttttcagtaccaaatgtatcaagcatatttttccccctgagtggttggccttttttaatgaatgattagccttttagaaacaaggaaaacaattagtgtaaagagtttcttcaaactagatatctgagacaaattggggtaggggacttgatcgaaagaaagtgtaaagataaacacacaatcacaactgggtagattgataattgggtcatgttagattgaagtagattctactcctttgtaattaattcgctcatattctaattatcttcctacttttggatgatatgcatcgtatgctcataatgtattctttcttgttggttgagtaatttctccttacaccctataggcctaaaagttgtagttctgctgcatatttctttttatcagggatgaccgtgccgctgtggtgccatgtttgtattttatgaactttacatatgtcttttcactaaacatgatttatcctacaagagaaacaaagagatttgacaaaatgcggagtaaagaaaagttggggacattttgtagcttagaaatgttggtaccatagccctcttcatttttaatacattattgtgataaactgatatcttagtattatactggtcctctattagttagttaatcatgtaagcatttttctcatatatcgcagactgtgccagattgtcagaatctctaccggaattctttcacttatcactgcattcaggatgagaggagcttggattttgatggtgcaaacaggtttttaggtaaaatccattctattctttgagcatttttgtttggaatggaatgaaatctctattttttccctgtgaaatttcaagtttttcttgaattcgtactccagtagatagtctctgtgcttgttttgacatttgaaccaatggaaatgcattcctgtagtaggaattatgctgtagtttgcttgggcagtgctaaactagaaacaaatggtggatgtttttgtttttatcatttgtttcgttatctgccattgcagaacagtgtgaaagggagacatcacgtgttcttgtccattgcatgtctggaaaaaacaggtgtgatagcagtgttgtgagcattcatgttgttagcattgttgtgaatgatcgattaatacttctctggtacaaaatttccaggtctgcagctattgtaataggctacttgatgaaatctaggggatggagactttcacagtcttaccaatgggtgaaagaccggcgaccacaggtgcaactgacagatggtatgatcccataccaaataatttatttcttctttcatgcctgaaaaatctttgccaacccctattcaaattaatataggtgcttggcgagatgttctttgcaaaataggatgtagcatcagtgcttgacggggaccttatacaggctcttaaatttacatagataagctttgaaagcttctgtggctcatttacctagcatagtagcgccctagtacttatgcatagctactactcaagcttttttgttcttatagatttcgccttttgtttttcaagtaacattatgaattgatggttaatccaaatgtttgatcatgagctaacagtaacctatttgttatatatacagcttcacagaatcagctcgttgagtatgaacagaagcttttcggacccaatgttggcgcacctgctcaatcgtcggttccaactgaatcatttcgtcctcttggatttggtttcccaaaaccggcaggtgacatccaagcgcccgtattcaaccagcagcccgtgccgtccatcttcgagcgagtcaacccaagtaatattcctagtaattttacttttggagcaatggaggccaacactcctatggacgacaatggcgcgcccgcaccaacttcaggtgataacccgatggacagctcataacaagtcataactcataagaggacctgacatgttcaatctcctctgtagtgattagtgaatggatattactgccaggcatatctgatatgcaaaatgggatgttatttagatggtctctagaattgatgaatggttctggcaaatgatggcaattgatcagggttatatgcactgactgccaatcatggcaaatggacctgtgggtttatatgcaatagactaagttaatcatgatggcacgctttttcagtcccatgaataaccttgaaacttctattacgtacgcatgtcatgcatagtgtatctggacgcagcatcggccaatagcgttaacatcagggcaccttcaaacaaaccatagtgttaacaccagcatcggcccatcgtttggcttattaatgaaactcttatatttgcaaacataaagtaatttgtgaatataatttatatgtactcgttcttaacgatataaaagcaaatgtttaatataaactttgatgaaaaaaaaacctcaaaatcagttttaaatttaagattacaaatttaaattttggttgctaagcataagcgaaaagatatgaccaatagtttattcttaggctagttctttttctcaactctaaactttaactttatcgtttttcgttagcacatgcttttcatataaaaagtttttatgtagaagttgtttaaaaaaccaagtaaaattatttattaattttgatagttagttacctccatatatatatgtatgttaaactagccaatgtcatataaaaaacctagagggagttaatcatatgctagtatatgtattctcgtttcgcgttctatgaaaatatccgtccaactgaaaaaccaacggggccttagtttctcacatgcttccgtacgcctcaaccaattctgattctgaaaccttatagcgagatgcatctggacatacagaacgtacaaaggttcattgcacctggacgtacaaggttcattgcacctggacgttgtaaaaaccaacgaacctagccgcgcaaacgccccggcgtccacacaccgaaacatatataaaaccgcctcgtatcgtacaagacgccaatccacccgaacctgcaacggaaaaggaaacggctttgccggcacacggcaacaaatcttgttcgcgccgccgcgtgcagtgctcgtttcgatcgaggcaacccggcgatcgcgcgccgcccgattggcgtgttggatgggagcgacgcggccgtcgccgatggcgtacaagaaggcgacggcggtgctggacgaggcggccagggcacggctgcgtggcccgttcgccagcggtgccgcgtccctccggcgtgatcaagacgacgacgacgacgacctcctggtggatctggtgcacgagttctacgacgacggcgagcgcggcgcggacgccacggcgaggggcggcgtgtcgtcgtcgccggagccggagcctaccgagtggaaggacgcgctgcgcgaggcgctagcggacgcgacgtccgacgcggcggccgcccgcatccgcgccgaggccgagcgcgccgtccgggatgccgttcgcaacggcggcgacgtgatccggaagcgagtcgtcgagcggctccgcgcccgagggttcgacgccggcgtgtgcaggtcgtcgtgggaaagaaccggcagcgtgccggcgggcagccacgagtacgtggacgtgacggcggcggcgtcggcgacggggcgtcgcgctcgctacatcgtcgaggtcaacgtcgccggcgagttcgagatcgcgaggccgagcgccgagtaccaggacctcctcctctcgctcccgccggtgctcgtcgcgactcccgaggccttcaggggggtcgccgcggcaatgtgcgccgcggcggcggagtccatccgcggcgcgggcatgcacctgccgccgtggaggcgggcgcggtacgtgcaggccaagtggtccgcaccgtacgagcgagtggcggcggcggcaccgccggagggagctaggacggcgccgtccggcggccggaagcgttgcggaatggagattgggcgcagggagatggccatcggaaaggagagattggtaccatttttcagagggttatgagttgtgagttgtgatgcagagtggttgcatcacaatcatcactgtgaaccgtcactcttctttgctttctgtagtgagttttttttttagtgtctgtacaatttgtatattttggatggcttatttggcggataaaacaagagtgggttatctgaaaattgtaaattcagatacctatgcctaccggattgagatcaaatacagttggtactaaaaaggactgtaagtaatcaaccgttcatattttgatttaacgattcacattcattgctacaaaatgtataaaatatatatttttgctacagtcacacaatgatccaggcccttactttctctatcatgtgccgccgaagcaactggctttttttttaagaactcccgaacaactgcttaagttgcaattatagggtctgtctggtagagttttaacttctctatcatgtgccgccgaagcaactggctttttttttaagaactcccgaacaactgcttaagttgcaattatagggtctgtctggtagagttttaacttcaggagttagatatagagtggagttgtggagctgcctaaatctagctccacctctccagttcattttgtgaaaaagcttcattcaactccgctcctattttacgtggagctagaactatttggctaagttccaatttcaagggagagctggaactgaagctgaagctataccaaacaggctcatgcttgcaactgcactggatcgtgatgcatggctgccaacctcctgtgaaagcgtgttgctactcctcacttgtgaaaaagactgtaccactcaaattctggcacacgcacttccgcctgaaagcctgttttaccggtcgaccatgaaactgccggttagtcatgcagtgcgactcctgtgatttttcagtcatcagggactcaagaagcaccaaacccgggtattgcctgctccactacgaaccaacattatctatccaaattcccagtagaccagaatgaagagaagtgctctgcatgtgaccaaggcactaccaagtaggagtaccaactacctaagtatgcatgctcagttgctcatcgttcaggacccacccaatccatgtcaaaccactcgtccaatgttcggcaatgcaccactacatatacatatgcagaccggccatccactgtacacgaattgcaggacaggactgacccggcggataatccgggcggttagaccagtaatctcaagagagccacgctgcgataagcaacgcgaagtcgtcagccttgcgatacaccagcatcagtgtgcaggctcgcagcatgtcggcgaaggagaagagaattttggggagacgcagggtgcaaacagtggcagggacgggagaagaaaacttgggtattttgctggcacatcagtcgtgtcgcgctcacggccatagatcccttacgccaccgatgaaaatagcggtagataaaggtctccgtcagggagacgaacagttagcgtaacagttgtgtgacacaactttgggactttgagcatccttttcatttcatgtaaaaggtactacttctaaaaggaatcgattgagaaactgtaaaggcactgaaagaaccatatgcaaactttagtagagttcattttcagatttcaaatttcagacaccaatttgacaggttatgagaattatatcatcaggaaaaaaaagttttaggattgggattagttcctagtaccagaactatactaagcttgagcctcaagcttgccggcgccgatacgctaaaccgtacgactacaaaaaagacgtgccattctccaatcatccatcgtccatcaacgcaataatacgttcgcatctgacgcgcgcagaaagcccaccttcgttggcgccgcaccaaaacgagactcgcaaagtcgcatcgcgtcgcgtcgcgtttcgcttcgcttcggttcggtgggagacgggaccccccccccccccccaacccaacacgaacgaagaattccaatcgcacagcgcaaccgcatcatatggtcatcgtcatgggttgggctcgcaccgcaccgccgccgccgccgccgacgcgccaactggtggtgctaccacgccttatttagccacaccgtccccttcccgctcggtgccaacgcgcgcgcgcgcggcgaagcgaagcgaagcatatggctctcctcttgacgctgatcctcctctccggcctcggattcttgccccgccatgccgacgccgcgaggggctacgtcaccgtctccacatccagcttcgcggtgagctccacctgcgccgacgaactccctggacgaggtacgtagttagtagtagtagacagcgagcgagcggggagatcgaactgttgcttctggtttttggggccggattgtgatgaaagattgggattcgttgcgagtttcagctgcctcgccgcggaacggcacgtcggcggtgctgcggctgacgcaccggcacgggccgtgcgccccggcggggaaggcgtcggcgctgggatcgccgccgtcgttcctcgacacgctgcgcgcggaccagcggcgggcggagtacatacagaggagggtgtcgggggccgccgccgccgcgccggggatgcagctggcgggatccaaggcggcgacggtgccggctaacctggggttctccatcggcacgctgcagtacgtggtgacggtgagcctcggcacgccggcggtggcgcagacgttggaggtggacaccggcagcgacgtgtcgtgggtgcagtgcaagccgtgcccctcgccgccgtgctacagccagagggacccgctcttcgacccgacgcggtcgtcgtcctactccgccgtgccgtgcgccgcggcgtcgtgctcgcagctggcgttgtactccaacggctgctccggcgggcagtgcggctacgtggtcagctacggcgacgggtccacgaccaccggcgtgtacagctccgacacgctgacgctgaccgggtcgaacgcgctcaaggggttcctcttcggctgcggccacgcgcagcagggcctcttcgccggcgtcgacgggctcctcggcctcggccggcagggccagtccctggtgtcgcaggcgtcgagcacctacggcggcgtcttctcctactgcctaccgccgacgcagaactccgtgggttacatatcgctgggcgggccgagcagcaccgccggcttctccacgacgccgctgctgacggcgtcgaacgacccgacatactacatcgtgatgctcgccggcatcagcgtcggcgggcagccgctgagcatcgacgcgtccgtgttcgcgtcgggcgcggtggtcgacacgggcacggtggtcacgcggctgccgcccacggcgtactcggcgctgcggtccgcgttccgcgccgccatggccccctacggctacccgtcggcgccggcgacggggatcctggacacctgctacgacttcacccggtacggcaccgtgacgctgccgacgatctcgatcgcgttcggcggcggcgcggccatggacctcggcacgtcggggatcctcaccagcgggtgcctggcgttcgcgcccaccggcggcgacagccaggcgtccatcctcgggaacgtgcagcagcgctcgttcgaggtgcgcttcgacggcagcaccgtcggcttcatgcccgcctcctgctgatcgatccatcctaacaactcacccacgacagtattcttctttagtacgtacatggcgtataggtgtatagatatacgcgtacaatgtacgtacgtacacgaggatgataggcgcatatacataacataacactagtagtaggagagtacatagtacacaaatacacaaaggttgtaaggcatagtactttcgttagtggatatacgatttttgagagtaataataataaattagttaaacgggctaaccatgtgcacgtgttaggcgcttgacacgcttggtttgatttggtgcgtcgtggtcagtggcacggtgctcaactgatgtgctacgactaaaagtctaaaactagtggacagttagggggacgtgtgggactgtggggccacctcgttctgttgtgcattgtggctgctgtggcccaaggcccagagagaaaacgttatctttttttttaatctcgtagataatgctggatctgtattgttgatggttgttagccgaacattcacctgatatttgtgtgaaagtcaagggccatagagttatagtttgaacaatttagagcatatacaatttcaaatatgtttataccgaagatattcctctttggaatgcataactcttaatatatgcaggcataaaaaactaagaacaaaacatcacaaattatgaactcacatgatgataaagcacaagaatactagggtcatagcaaatacacaaaaaaaaattagtagggatacacgtggaccagcctataaactctgtttgatatacggctgacaagccatgataaaataaattttacaaaaaaaaagaaatactttcatgcatgtgttgtaacggtttaaagtcaatgcttaaaaaaattaaaacctcaaaattaacttttgaattaacattttcgttttgtagacataaaaaaataagaacaaaacattaacctataaggcaacaagtagactatgagatagcagaagaagaatccattagatgttttctaggagaataacatgattttctctttgaaatgccatgtgtactctactagggattctttggtggcacaattctgtatcagtttgacagctgctttccggtgctccaaaggaaaagaaaatagaattgatgtttcataccaaaatcccattattatccaagactattggccctcaagagtaagaaatagagagatggggtacatatgttctggtgaacagagtggacgatatcgaaatctccaccacaaaattaatatagtacatcccttttaatagataatgccgttaattttttttaataatgtttgatcatttatctccttaaaaaattagtgtaaatatgtaaagtataagtcatacttaaaattcctttaataataaaacatgccataacaaaataaaataatatttatattaattttttgaatatgatgaatggtagcatctcaaaaaaaacggaggagcatatggatcagttctcttaaatccattcgaaagaatcaaaccaaaacaaagaatagtacagaaaaacaaaataaaaattgcacaagtgccaccatacgcagttacgtgcaatctaacattctgttggtaaatcagtagggcaaactgtagtccattgggaatcaccaagaccattctcacacactaattattggccagacacttggatcactaatgatgcatccgtcgattgggaatcaaacgatcgaattaatcagtataaagtctttattattcataaaaaatcatgaaaagttcactcctaatataatatttttttagagctagggactaatataatattttggttgttggattacaattgcaatatatatcattatatcttgtcatcatcacacgtcacgactcttacctcgcaaccacaaacaagtagacgaccacatgagagcaacctactgctaccctcttggcctctacgtgtgtcgtgttgcccggcccgccaggcgccggcgtcgcgccgcccgccccggtcaacacgcgccggaccggaagccgagcgtgctgctgccgacgtcgtacaggacctcgaacgtccgctgctgcacgttcccgatgatgccggtggtcccgtcgtcgccggtggcggcgaacgcgaggcagttgccgtacatgatcccgttcgggtcgaggtcgatggcggcgccgccggagaacaccagcgcgacggtcggtatggagatctgggtctggccggcgaagtcgaagcacgtgtcgaggatgctcctggccggcgccgaccggtactgcttcatgccggccttgaacgccgacgacagcgccgagtacgccgtcggcggcagccgcgtgatgatcgtgccggagtccaccacggacccggcggcgaacaccgacggcgacagcccgagctgcttcccgcccacggcgatgtcctgcagcctcgcgccgtagaacgtcgggatttgcctgctcctgagcatccgcgtcgtcacgaaccccgacacgccgccgccgccgccgagcgtgaggaacccggacgagcccgatgtcggcgggaggcagtacgagaaggaattcccgtacgccgccgccgtctgcgacacgagcgactgcgcgccgccgccgaggcccatgagcccgtcggtctggtcgctgaatcccgactcgacgtggctgcacccgaactggaatcccttcacggcgtcggaggcgccggacagcgtcagcgtgtcgcggctgtacgtgccgttggtggtcgagccgtcgccgtactggacgccgtactggcactcgtagttggtggcgccgcagccgttgccttgctgctcgagctgcgcgcactcggcggcggcgcaggagaccgccctgtaggtgctcgacttggcggggtcgaacagcgcgcccgtctgcgcgtagcacggcgggttggggcacgggttgcactgcacccacgacacgtcgctgccggtgtcgatggtcaccgtctgcgtcacggccggcgtgccgagcccgacggagatgacgtactccagcgtgtccagggaggagcccagcttggtcggcacggacgacgacaccttcgactgctggagatcgccggcgccatcgacggcggcgttcatggcgaacttccgctggatgtgctcggctcggagctggtcgcgtttgagcagctcctcttcggtcggcctcttcttggacgacggcaccggcgagcatggcccgtgccggtggttcaacgccaccgtggttccactcaacgacgacgaaatcgctgcaaaatttgacgcaccaaaacgattacaatttcactgaaaaaccacacgaaaattgcagaaaaactatgcgcttgcatggacagtcaccatttcgctcggagcagacggcctcagaattcagctcaagaaccttgtaactctgtccatctcctgcatgagcaactacagagtggtagctgcacaagaggagaagcagtagcggcgaaacagaagccatggctaattccttgcttcctaggcaagctgatcagctagataattgcagctttaaattcctatcaacttatatatagagagaggatagactttcatgcgtgcatgcaaacgcacgaaatgccatagcacgcaaaccatgttactacctactaattgacggagactcgcagttgactcagtaaacaaagcttagatgatacttgttgatacaccacgacgaatagtttgatattcgatggtactcgttgatacgcaatgatattcgttgaaatactctttgatacatgatgatacttgagaaggagtgaggtcctctgtagcactggacatacagcccaaatgtcagtgagtagtaatgtatctgcaatactactacagtagatctgaattgcttgagaagatggattctcatccttgagaatatattctcacttttttacatatcatctaaatagtttctattagaattgttggcggaatctatttgatataacgctagttaataataatgtggagttgaggcccttgagggtttgtcccatcacctatcgtctcttttttatttgtgtgccttagcacagaagccagaaatataaatcattttcattattataaaactgcaagaaacgaggggatatcccttacatgatgaaaccacactttttgatacttgatactaaccgatgctaattgatacataataagaccccctttagaacgcatgataagaaaaatacagaaacaagaaaaagaacaaaaatttgaagtggtatgtttttacaaattctatctgaattgaaagcataagaaactagaagacaagccatttcattacatcacaggaaaaattgaacaaatctttactattataaaaattgaagatgtttttaccggtattttggtacgtcatccgcgtttgagtcggtttttaagttcattcacttttaaaaatacagatccgtgtttaagtcagattttaagttcgtttgcttttgaaaatacaaaaggagtcgtataagaaatctctttaaaaacacttgcatgctaacttatgaatttcagactcttaattgcagctcaagattttctagaaaaaaaatatccaagcgaattctcatagcgaatttcaccctagccaaaccgtataacaataacaagattaaaatagcattcacccactgcaacgtacagacatcttttctagttaaataaaaaatttaaataactctaacttcttgctttaatttcctatggtattgattggactggaccgtaagaatgtattcatatggatatttcctatcttttcatatgaatgaaaggcttcaataatgtgttcgcgaaaaaggcttcaataataaaaattccttaggaaatttaatcctctaaaaatcctttgcccatcctccatgatagtgatattcaatgataatgatgtttatggagtttcaagaaactacaatatgctagtattgttatgacaatattgattcttttcaaagtttcataacaccttaggattaataaatcctaatatctcgggggatctcgatcataatattgccgaggtatcatatacggagtagctagcactttccttcctcgatttgccttccagtccagtggaccatagctcacccagtaacgaggcctatgacggtataccgctctatgacggtataacgtgcggtcgtagttgtccgcgtaaacatagggcttaactgaaacagagaattttcaagttcgtacgagagaattgaacgtactgctcaagtgaaattcagcatcttaaaactatgaccatgcatatatattttttaatatggtatcccgtcattttcagatgtggtgttgctgccgttaatccgtgatcaccgcagaaaatgccagtatgccacttgtgaatcatgatacgatcgacagtctcagggctggcagcttatgatcatctctctgcaggactaaatttctgataactaatcagtgagaataatcaaggtacgttcacatttgcgtgcatgcgcatggacggctcgatcgtgaattcaagttcgtcagttagtgtagctacgaccaatattttgttgatggaagaccacggaccatatggcacatttttctctctgcccaatttgtggcatggcatactggcgccgtttacttctagtcgcacttcgtggaatggcatgcaggctgtactgtagatgtttggccaaacatcacatcaactgccaatatgccatagtagctagaatgccgtacgtacattatatagcccattgcaagtctctgaagaccccaagtaacctccacgctgacgcaacaaccacatccgaagaccacagctgtagctgacagcccggttccaggtcattagccgataaattaattaaattaatcattgtagattctaaagttaataaatactgtactagtttagacaaaagaaaatatatatctactagacaacatgtttttaaagaaattgtactttattaagcgtcacacggatagttcataccttcgttagcttaaaaagaacgaggttgttttagaaaaagagagactagatgacatgatcccgatagttatctctttctaatacagtcctcctccatcctaaaatgtactatagctatttatctaatgctagttatgaatttatatatatatatatatatatatatatagacacacagttgagaatgcattttgaatatatattactacatctattccaaatatagggtactttgattggatgtgacacatcttatctagattcgtaaatatactattaagatgtgtcacatccgacaaaagaccatatatttgaagatagaggaagtaataatgatgagtacatgcatgtgcaaaacatcgaaagtgctttaatttttgggcaataatgaacatgtcttgttcggcttgaatttttaatatgcgcactaatctatatacatttgacagtaaaaaaaaaagatagtaaatatttgacagcgacgagccaatgacaaggcataatatatacgcacgtaaatggaaaagaaaaatccaattcttttttctagttttgccgttttgtgccactagccccgtctgttgtgcgctcggcgacaccttccccgtcgcagaagccgccaaaggggagcaggcgcggatacaaaaccccggcttaattatctcccactcgtcaacgaatcagcgcgccgcgccgttctgttgctacgcacagtggcatgaaacgggttcgttcgggattcctcctgcctgggggatgtaaccgacaaacccgcgaacttatttatatacaaaattaatggataatctaataactcgtagattaacttgcgggttacttactaaatttgatatataaatagatttattaatcaacccacttgcattttttagttacggtaattaaatcgagccacaacgtagaaatccatagattattacttatttgacatataagtagattcgcaggtagtctctttttgcatcccctgtcccctgttcggttcgagaaaacgcgttgctaatccgtggaaaagttgggagtagtaaaatacacgtgcactgactgagctttcaccttgcccggctccgtctggctccttggcttgaggtgttcggttcgatagtttggtcttttgcacccgggctgggcggggacaacggtagctagtgagatggaccaccggtatgtgacacagtacagtaccatacaatagcgatgctgttgcctgatgtgaaaggccaaagccggatgcttctacgcagcagcgtatcgcgttgtcgcttgcggcgtttctgcgaagactgtgacgttgcgtgagatgagatgctagccttggaccttactccctccataaaaaaaaaaaaaaacaattctaacatctcaagataaaaatagaggaaatagagagtgactataataaccttaatcatttaaaaaaatagtgatagtgataggcaggtaaaaagtattgaagggataaaactttttattttttttttgggcggagaggagtagaaattttgtaaggtcgtctgcatagcatgcatgcgcaataggctacgtgtggcttggctcagagaactgcagtgtttcagcgcatcgtcaaaagacgtaccctccatcctaaaaaaaaagtccaattctacctacgaatctggacacatgcgtgtccacgttcatagccagggtttagctttttttgggacagactagtatgctagaccggtgccgggtgccgccttgccggagcacggctgaggcctgaggctagcttggggccgtgccattcccgaccgaccagtgcggtccatggaggtcgagacggtcaccgatagatttacgtggcacggtgcggttgctgtagagaagatgaggaaaagagtgcccaggttactccgtttcggggcaccccggaagaagctgcgactcctgtcctgactcctgactcctgagtcatgagcatgttgttcatcgctactgtcttcatcttaaaatatacatatactatcttaattttgatcggatataatatattttaggattataaatttgaacagaaaatctgttcatagtattgaaatgtataacatcatatcaaaataacttatacggagtactttgaaaacgaaggtagtagcaaactattacggatttaagtggaaatggacttctacctatattgtataattaagttgtgtataatttagtgctaagctgtatttaagacggcaggagtaacatataaggatgatgtgttctttccttttcccaacttctatccttattaacttatacccttattttccgagcgcatattttttaaattgctaaccagtgtgattttttttaaaaaaaaattctattgaaaagtttacaggaagagaaagcagcctccgtaaaaaaaacatgccacgacggcggtcgctgtaaacatgactccgactcaggacagcgatggtgataaagcaactttgctctgcaagctttatgtaactgcacggaaagggagaaattcagttcaagtgctgatataaagtgttacatacaatgtgacgctacaacctacaacatcggcttcttgacaaaattttctgctgcacactttattacactagtttctcgtgtgactgcacctctacaagctggcgcatatgatgcttcccagcaacaggatgttacacagttacaaatagtacaggtacaagatatacattacaatgccactttccaattctgaataactgaattcatacatacccatctcctcccgtgtgaagtagaagttgcttcgcaacaagaatggaccataacctctattgcaaaattggctagctagcctgaataatttcctcagatggcaatttaattctttgtagaggagcctcaaatctgtacaagttgaacttcgtgtatacctcctgtatccccatttggcaaaaatgccttaaggatatcaaattgcatgcgattgatgtggtgtaatattggtcaatgtaatgctgttcaatgcccatttgctatgagatggaagtcctcttttatttgatatatggccttccagttctcaatttcctcccttcataaccaaatgaattgacatttcagtataattcaaatgaattaaacaagcggaaaaaaaattcaattatcttgagttaaagctgaataaacccaaaaaaatataaagtttgaaagaacacatataagcttatgactaaccgtaagcagtgaccaatagaatcataatgtagaagagcaataagcttgcgttttccttcagttctatggccgacaccacgcttcacgacaggcagctgctttattcctctggcctccataaggttttttgcagtggtcaaatcagtatcaggaaagcaggttagcaatccacgttcattcccctcgtactggaatcctcgagtaagacacaatgatatggttgaagaattttcctgcaacatctccattaattagtacacattccttgccagcctgtgtaaattgttttgtttttacctttcagagatagaaagcatgtacattcaatttagaattcattttaagctatcgcattaaatggcaatggtttaaacaaaatcagtgtccagcctagaccagaccaagtgaaatgatgcacaccaattcattacttatttacgtagaactattctaatggaaatacatattttcaccattcaaacgtacagcgggcttgagctggtctccacttgtgaaactgtccccatgtaattcaaatcccatacggcgaatatcccctaatgtaacaattccttcgagaaaatcttcacaatccacaacaaggccgcaattttgctgcttatcatgcaaaagcttgagagcttctgtcaccatggcagatgttggaattttaacatagctctttgacatggcctgggagacctggtaaaagagttcaaatgacaaattaggatagaattaacataataacatgtacttctattgaaaattgaacgcaccattgcatcagctagaccgttaacaataagaattagaggcctacaaaccttcaaatcatctagaagcatttcctcattataggtgtcatagttatcagtccgtaagctagtgagctcaagatcatttacactgtcacctcgcctccagcttttactatttctatcttctgaagaaagtgaagaataaccacgcctgggtgttctaaacctagatggttcaccatcctttgattggtttactacagaaggaacccagattgctaacccaactgctccctgttggacaataaaaaataagtgcattagttttgataatgcaatagtgaaacataaaatcacaacatttatgtcctcttctagacatcatgatgtgacaaaagagaaagactatatcaaaacaaaacaatgggcacactacataaacagtcatacttaccatgagaggaagcaaaatcctgtagtcctttgtcagttcaaagagaagcagcactgaggtcagtgggactgaacagactgaagctagtgtagcagccattccaacctggagttctgacaattagtttttgtatatacaaggatgtagaaataacagtattgcttcaagcaatatgaaaaaaaaaaaggaaaacagagcaacttactagagcataagcttgtggctgtgcaacagcagcattaccaggtacagcagaatttatcaaatatccagctgaccctccaaaaacagctccaacagcagccccaatcattaggcttggtgcatatagcccacccacaaggccagatcccttgcaaagggcagttgcaactacctttgcagctgcaagctgagttaacaaccatataccaggagcagaagcacttttcccagtatgtagtatttcttcaacatttgtgaaaccccagtatagaatgccaggatatttgagagctatgaggccagctcccagtccacccaaagcagggtatactacaataggaaaatcgtatctttcttttaagtatccaaaaaaattcgaaaaccatacaaccaaccggccaaataccacactgaccgctccacaaagcattcctaagatgagatataaaggtagctctgcagaacagaaaatgagacgacagaatatcctttagaacctatgctgttcatatacaacaatacaaaaggagagaattattcaaccaagaagccatgtcaagataatagaaaagttgggtttgtgtgaataacttataaaagtagggcaagtgctgctaaactttatgataacatcatctctgaaacatattactataggcctcaacaaaatggagatagcatattagggcttgatgaaccaagaattggtagtggtgcaagtggtgtatcataacatgataaaaattggtagtgtttgttactgtagttaatagatgaatcttcaatcttaaagataaaggtaaaaagaatcaggggagataccggcagcagattttagctcatacgctggcactataaaagctggcctttctccaagcagaacatttgacacagtagatgatataacagaagccaatattatcattgcagttgtaaaaggaggtgaattttctgctttcagtggcctcagtacagtttcaatggcaaagaaacacccagcaactgctgcattgaagcctgaaaacacacaacacaagaaacagtatattagcaagcgctaacaacaaaaaggccaaaagggtaggaacaaaatcaaaatgttaaattttagagttacatgggagtcgtgaaatacaatatttcaagttattttacaaagatatccgaaacaatacatgttaactataaatgctatccaatttacatggaattgccattacgtaatacatccttaaataataattgtaaggtgctagctatcgaagtcatgatattctactaaggaaacaggtacgtaatcatcaatgacatacctgaagcaattccagcagcagcaccagcagctacaagagcaatccgcctctccctgttattctccatcatttccgagcacccatttgcacatgatttgccaatatccacactaggaccttcaggccccagtgagcaaccagtacctagagttacagcagcctggacagcatttacagttggaaagattgccgcaaggaaattgattccttgtttctgaggcggtttcacgagtttgagctgatcaaatatctcaagcaacccatgcatcattcctacaacaacgcctcctgtcacagggatcagcagtattctgtgccaagtatcagctagcctctgaaggcggagccaagctgcaccttcatttggggtacctgcccaagcccattcatggatgacatgaacctaaaaataccataacaggagctgtctatagaatcagtcatgcaaggcagaactgaaaaatctcaaccttaacttacattggaatcacttggaaggttttaaattttaacaaaatttatcgcgttttgggcaaccgcagatatgatgtgacataaggcttttcatttactgctttcagtgctctgttaagttgctttgaatttgcgcacttaaatgaaactgattttgcatcatttgggtgaatttatttgcactagtttagtttgcacaaataaacggatcaaaatcacatttgcaaagtcccttgggttcacatttgctagcatccatgaactacgtttagatcctataaatgatgagcctcactccggtgctttctacttgcagaggatagtcaagtttccagtctgtgagcagaaccagtgaaatgctcaccccacggttaaacgcggcgacgcaaatgccggtggcgagcccgaggaggcagccgatgagcagcagcgcccactccggcggcgccccatccccgagctcctccccgaccctctccctctgctgcggcgacgacgtcggggacggctcggggcgatcgagctgctgcggcggctgctggcttcgacgccccccggatccgcgcgcggagaggcggcggtcgaggtgccgcaggaggccacgcacgccgccgctccgcctcggggaggcggtgacggtggcctcccccaccgcctcgacgtccgcgtgctggttgtggtggtggccaccgacagcccgcggagatgggcacggcgacgatgagccggacccggcgccggcgccggccgcggggtgggatctgaggagcgaggcgtggtcgtcgtcctcgccgccgcgggacgacatgtcggcgggcggcggcggagtcagcggagatctgaggggcgcggaggaatgcggcaaagcggagaagttgacgcgcgcgggaccgagaggaagaggaggaagggggagagacgagagagccgacagtgcgagacagtcgtcgcggccgcgcgagatcgatggcgagcaaagcagtgcaaacggctgggtgaatcttgtgcggtgcgtggcggtgccggtggtggtggtgccagattcgtgcagtgagacccggatcttccgccctggggcctgggggcgagtagtgcacgtgccggtgccacatgctaacaagccagctattgtgttcttaaaacggaagggaccatgacttcacccattagagcatctcctgtgtgtaggagtaaaatagaactaattactcccttcatcccaaaaaaaaagacaaatattggttttcgtgtccaacgtctaaccatccgtcttatttaaaaaaattatgaaaaaaaattaaaaagacaagtcacacataaaatattaatcatgttttatcatctaacaataatgaaaatataaattataaaaaaatttcatataagacggacaatcaaagttggacacggaaactcagagtttgtctttttttagacggagggagtatacatgaaaaaaaaatggagaaaaccacactgtaacaaccgattgttactcgtcagataaaaatcgatcacaaagaaagaatagaactcagcgacgaaaaaggtggtatgcagccgttgtgactgacggtgcaagggacgatggatgcatctgattagagattcattttctaagtgggtctcatgatcgatttcaaatgttgcagctaacaaactaaacttttgttcgacccagtaatcgaaccaggagtgcaggtccctttagtgtttaaattcaaatcctcatagatatttttccccaaagaaaacctctgaaaagagatggatttttcttttcattataaaagaaaagagttaacttgtttattaaaaatccctagaactttataactgcataattaattggagcaaaattgactaaaacgcctccatagagaacacaacaaaaattgcattagacaataccccctccatcctaaaaaaaaaaaaagaccaatcctacatacgaacttggacacatatatgtctgtttcgtagctagaaattcgtttttctctgggacggagtagtacaacataacctaatgacctataactaaagagagcagtcagaagtaggggtgggcattcggtctgaccgaaaatttcggtctcggttttcggtcatttcggtttttgaaaagtgaagaccgaatttcaacgcaaaaatatcaggactgacaaattcggacttggtctcggtcctgaccgaaattcaacaacatttttatatatgcaaagaaataatagaaattttcaacacaaaaatcacaaaaaaaaattccgtaagcacgtctcttattaggttgcatgcctagaaaaagtagggatgtgaaaactatagtttaattctattgaatttagtaaattgtaggttatatttagactttttttttgttaattcagtcttttcggtctattcggttaaccgaggaaactaaccgaattgaccgaacaaaattcggtctttcactgcctaggaacgaatttctcggtctcggtctcggtcttttagttcggtctttttctgcctactcttagacacaaatcatcgttgctaagcttaaagttaatcaaagagatatgggtgtgtttggatcctagactagcaacattctttccttgttaagctaggttaggtatttggtaaattacttttaaaattagctttgcttatcaaactagtctactttggctagaaaatccttatccatctaggagagttaaattggatatccatcatcaagctcctgaacgagcagccttgctttggtgggatatatagcttggtagctccctccgccgcctctcttctccctccggtggcggtggtggcgtcggcagccgccgattttttttttttacaatttttttcatggctattgctaactgaatcggattgtgtatggacgaaaaacggacgaaaattagatgtgacgaccggaaaaatacgaatatttatattagttatagaagtagagggaaatactatacaagccttggaccagataaacttgggctctgatatgcttgcatttaggcaactggcaagggaaacagcccaacaaacaattgtgtctctttaagtgcaactaatgggctataaacctgtgggctagccggatatgcattgtagcccatctaataattttctgacgtcgccccgtcgtctcctcctcctcctcctcctcttcgcggcaccaaaccaacgcaaagacgctgcatgtggtggcgtgccgccgcccgttgcgggacgaagcctaagctatgtcaagctctcaactcgcgacaaggggttaattaggactgttcactttgatgaaaaaaaaaccttaccaaatttcttttatagttaccaaattttgacagtaaactaaatatagccatttttttctgacaactttactaaaatttagtatggttgaaaatggcatcaaagtgaacagaccctaacacaataagtagccgcgccatcatattagcggcgtatacacgcactataccagctacacctaatactatactacttgtacgagtatacgtacctgctgccaatggacgccatggatgattctttctggtggtaactaactaactacttcgataatgtgggcatgatttcttggtgcccgagcgcgctttagcttcgggacatctcacgtggttggtaagatggtcatttcctttgctggtgacggtcgtctcgccggttggtactacgagcctgatcgacgagagattatattcttagacagtctctcatggttttcagctaggatatgtgcataaggccattgtctttataatttgcccccatcgccggaggaggcttagtgctgaagcttcggagaaaaagatggtatattcatcgatcgatcgactaaatcacgcatgggaatctctttctctctctcaatctgatcaatcactctctctgataactgaatttccaccaacgaacatgatagcattatgctttccttgatgagtactatatcgatgggtaggttccctttcttctttctctatgatttggactgagactatgtatgagtagtagttagtacgtactagttcagattaaaaattctgttattttggtcgggcctgttctaacttgattattttggatggttgctcaagctagcttactattagcagtcactaaccactgcagtctacagattgtgaaagcggtactactatttttcaacttttagtcatttttaaaagcttattttataaatagacccgtaaaaaaacttattttcaaaacggatccttttctcggtgccatggttgttggcaccgaggtccaacatctcggtggtgccaacgttagcattgacgcttcaccccgtcgaagctaagtcaccaatacgaagggggacgacgacaatgacaacaccaaggacctgttgttttttcttttattggaaagggatacaatgtaaatattttttttcttataaataggtcttgatgtcattttaagtagtgtagataggtcctcaatgccaatgtcatttgcgtcattccccttcatattagtgagttagcttccataggggtgtaagggtgttggcactaatatcattggtgtcgagattgttaacgaccaaatttggtaatatcagcattggaaaaggagattagatcaaggtggagtcgaaggcggagattgatccgagaacagagcaagaatcggctgaagtccagatcggctacgattaggatcggctggatctgagtcggactaggtgagccgatgcagccgattctgacagtataatttgtcgtatgacatcgggttgaattgaggtgcttcaagatgattgccgcacatggatagagtcctgagaaggcaattgtatctattaattaggatgttttatgtaacttccttagagttatgtttgggcaaaagtctgccgcaaagacttatggtatcttagagtttgttagagatagtgatcgtgtccggtatggacatatcttgtaattctcgggtataaatagaccccgagccctatgtaattttgaacacacacgttcaatacaatttcggcgtatcgccacctttttgttttaattttgtttcgacgagttcttgctttcgggttgagctgcatcggttttgatcttcaacaagaggtaaaacttgttatgacgacttgtgttctcgagattagtgcttccatctttatgacactctaatcttgtctatataattcgtcgagttatcatatatcttacataatctttggtaatatcgtcatctaacctacaatcggctaaaatcttgtgccgcatcactattctgattaagatttcccccttgcaactcctgagcaccatcaccttgaactccatgcgctccatcgccttgaactccatggaccccttgagagttgtaaccttgacttcctagagaaccgtcggtagcacctttgtccaaagctccaatgcaggtccaaagctcgtcttcgaatgtatgagcgtgccaattgatttgatcctgtaatcaacaagaaatagagacaaagaattcgtggttaaatctataaatgatagccgatcggctaggtgccgatgacatatcatttatctttgagccgatgtcatatatgaatcgattggcggttataaatagatagtgaggaactaaatctattcgatcggctgtagatattaacgatatatagttcttatattaatatatacttaaatcaagtgattgggatagatcggtcaccatgccgagacagtataaatcacttagatcgaaatatatattaataacaggattatatatgtttatagcatagccgatcagatagatctaacatgtatcggctaatactctgatactactttatataaagatatcaaaacaaatataatataccaaacaaaagcttaatatacttaaatgcaataagatcctgacataaagggcggatttaacatgtcattgaagcatatagatcgaatatggttaaatcatataagatcggttgaaactccgatactaccctaatcggcaaccagaggacatgctagagattgatattctaagcacgacttaatagatcaaactcaactgatgtagcattaagtatgaaaagaagaacaatatctagacaatcaagccgctgggtgtttcataaagtggtagatatcttacataatctaggacaacgtcgctatttaacctaatcggctgccttctattaacagatgttagccgattgtaggttagatgacgatattgccaaagattatgtaagatatatgataactcgacgaattatatagacaagattagagtgtcataaagatggaagcactaatctcgagaacacaagtcgtcataacaagttttacctcttgttgaagattgaaaccgatgcagctcaacccgaaagcaagaactcgtcgaaacaaaactaaagcaaaaaggtggcgatgcgccgaaattgtattgaacgtgtgtgttaaaaattacatagggctcggggtctatttatacccgagaattacaagatatgtccataccggacacgaccactatctctaacaaactctaagataccataagtctttgcggcagacttttgcccaaacatatctctaataaagttacataaaaaatcctaattaatagatacaattgtcttctcaggactctatccatgtgcggcaataatcttgaagcacctcaattcaacccgatatcacacaccaaattataatgttaaaatcggctgcatcggctcaccttgtccgactcagacccagctgatcctaatcgtagccgatctggacttcagccgattcttgctctgttctcggatcaatctccgccttcaactccaccttgatctaatctccttttccgatgctgatattaccaaatttggtcgttaacagagatgttggacctcggtgtaggattactggcgccaagaaaaaggtctatttttttggatttatttataaaataaataagttttttaaaaggacttagatgaaaaagccaggcactagctactatgtctataggtgtggatgctaattttttttagataatggaatagagcatcccagcctttgctcaaagagctacagccaattattataacctcacactcaaaatgagtgaagttcaaagaaacttaaaaagacgaaaccaatcatcaaaaacaaacaaactaaagactgctaacctaagataaagagtacaaaattattgaattctgtttgtgaacctctgtccaaaattgacaaaaagttggataacctgtctcaagaatatggcatgcagcctttaaaagctcgtcatctttctcacacttttgtagttgtgtctaataccggagtcaatgtggtgccctgaaaactaccttagtgtcgacgctaatactgatcgatgttgcttgatggacagatgtgttcatcagtagagggctcatactgcatttttgctagataggtgcgcttaactgccagcttaattgagcctgattagccgaatccataattgtgtgcacctaaccttacttactttgagccgtaggaacaaaagcagctaagcagcttttgcatcaccgtcccattacagcatgattaactaaagattcttgttattgagggcaacgatacagtagcagcacaagcgacatcagaagcttccgaattagaaccaaaagaaggcaaaaatatgaaacaggaaataaactgagaaagactatactacttgaactgttgatttatgccatcataattatgtcgataacgaggactttcaattgaaatatatatatatatatatatatatatatatatatatctacggtgatcatccacgtcaaaaaagatctttgatgattttgatcacggaggtactagtcgtagtactgaaacgtacgttagttatttcagtaaccaggtggttggaagctagcttggaacgccatggataaaaagattacttcagcaactgaactgaaagctactcgtgagattcccacgaagcccgaagagctagcgcgcgctatagctcactcggaatctctataaaaaggctgagcttgtagtcataaactcatacgcaccactgaaccacctgcaagacggaggtggtttcagagtttagagataagatggcgctgcatcttcttcacctgcttgccttctccctgctcttcgcagtggcgacccctatcagggacatcaccgatgtgtgctcgtcacagatcaagggtatcaataatcctccttgtcttaattagttagctttctcttgattcatgctgttaattatgtctggtttctgcaagtagatgaaagatatgtgctttgttgacatatccataacagtacagcttactactgagtttacatagcgctagccaattgagtagaaagactgaaagagcaagagtaccaattaaagcacctataagtaggatttgaagaaccaatttcagtttgcagtcaaaatagcatcacatcagcttgaggcaccacttccttttttctagcctggagtctttgcttgttttagcacctcggttaaactagtacaactagaatcaacatggtgaatggacgtaaatatggtggtagtgtaaccacaaatttgtattggtcatgtagtatccttcccctgaaaacattttcaggggaagtctgaattttctttgtcgatactataactaacttaagaaaaaaatgaagaaatgacagcgagggtgggagccaaatgacaaccaaaatcgaatcttttcggctcgatcatttctcttcttttccaactcttttcgccgccttgaattaaaatatacaggacagtcaatgatccgtcgccaccagaagaaaagagttttgttaggtacacacttttgtcgacggctaattgttgccgggcggcacgcaggtgcagcgatcgatcttatcaccacacaagcgtttttccaatgctttgtcctgaccgacaattttttttgtacaaatccattattagcggcaaaaactccgtccaagatggcatattttcctaagaaaaaaaaaactcttcctattgagtcctctcgatagcatcctgttctgactttaagtagatataatatgtggacttcacattcagcgagtttatatgtcagtgatgaccaataccagagaacaatactttggagagacttgtctctttccaatacgaccaaagccagccttcaatcgaaggccgtacacggtacactgttcactgagccatcgcaatttatatatggtctcagtcgaaattgatggccggttagtggttcgattgactgctgtcatggaaggccatgatgtgaagctctaacggtagccatacttcgcctctcccccgtgaaaccaccgatgccaaaccaccatatctatcagcctatcatgcgccgcgcgcgaccacaaatgcgccggacaggatggccgccgagatgggcaccggatcgatcggctagaaaacgtcaccgatacgtggggtttttcaatgccattgcaaatggcttcctttttggcaactttttcttttgccatgacttgaatcatccagcaccgatcgatgatattacggctgcatgtaggcacgctcaacagaaactcggtgctgctgtaaatagtttgcctagttagctgggccacctctggattgtactctcaccgtatcaaaataagtataacagcttaatatatgatgagacactaggatacgttacattgctatattttgatatggaagtagtactactgttgtacgtgatggtccagtccaacgccccctggcttcttcagaagtggttagttctccagtcatccaaagcagcagtacaatcctggttgttcccacttgagaaaaaatatctttggttgctcgtcataatagaggggggaaggcaaggtaccatatgctttgtaggtgttctgtacttaggcaccaagactgggtgttgtgttaatttgtggtcctcgttatagacatcagacaatcactccattatcttgtgtatcatgttaactaccaaccaaatgcatcaacttcagtccctttttgacgtgtttcctctcttgttggactaatgttagcacgtccaagctcttagattgtctaagcaatgccaaagtagaatcttccattttgcactagttcacaaacactggaaattaactgagactactattccatgcgtgggccttctaccgagaatatttcactcaatttcacaatgactatgctggttaactagctagcctatctaccacctacagcgatccagcgttgtcttgggatttaatatggttatgaccagataatgccaactgcaaatcctaccatcaataagagcttgaatgcttgatcgatacgtgaccgcaatcttgggtacgtgcccgggttgtacgctgttcgtacatttatatattccccagtagcacgcaacacagctgcaagtcatatatatgatcgacactccttatctgtaacataaataaatgaattattgttgcatgattgtttggacaattggatcatgtgatgacatatccacactcgattgggaacggaaatcatatgagctgggacatttatacaatctgatgcccagtacttctccctagttgtataatgtccgtacgtctcgttatacgtcactgtccagtcacaagacggctactactgtaaaaaattgacgacaagatggcgcaacggaactgatggccatgtttaacgagctactccctccggttctatataataattaatgttttggataagattgatgtcaaacttttataactttgactatcaacaactttaaaaatatttagtttaaagaacatacgtagatttgtctttcaaaacactataataaaagtaaacatgcatttatttattgtgtatattataatagaaaatataaggtcaaatatatattttgtaaaccgtgtcattgtccaaaccgtcaaataaaatgaaaccggagggagtatagtgtattttcaatcatcaattaaatgcattgttgtttatgtggcttatttgaaaacataaaaatgacacctcccattaattgcaaatggccttatagccgcggcagaatttgtttagaatctctaattttaaagtagtttttttttgtcatggttgcggtaaaaattggatgaattgacgcgggcgaattaaggacgtgccggtgaattttgtgcagatttccagtacctgaacagcacgggcctgcaccttgagctgcaccacccgcggagcccctgctcgccggcgccggtcccggccgacctcccgttcacggcggtgctcacccacgacgatgcgcgcatctcgtcgctggcggcgcgcctcgccaagacgccgtcggcgcgcgccacctccctggacgccgacgccgacgccggcctcgccggctccctcgcgtccgtgccgctcagccccggcgcgtccgtgggcgtgggcaactacgtgacgcgcatgggcctcggcacgccggcgacgcagtacgtgatggtcgtggacacgggctcctcgctcacctggctgcagtgctcgccgtgcctcgtgtcgtgccaccggcagtccggcccggtgttcaaccccaagtcgtcgagcacctacgcctccgtggggtgctccgcgcagcagtgcagcgacctcccctccgccacgctcaacccgtcggcttgctcctcctccaacgtctgcatctaccaggccagctacggcgacagctccttctccgtcggctacctcagcaaggacaccgtctcgttcggctcgacgtcgctgccaaacttctactacggctgtggccaggacaacgaggggttgttcggccgatccgccgggctcatcggcctcgcccgcaacaagctctcgctcctgtaccagctcgcgccaagccttggctactccttcacctactgcctcccgtcgtcgtcgtcatcggggtacctgtcgctcgggtcgtacaacccggggcaatactcgtacacgccgatggtgtccagctcgctcgacgactcgctctacttcatcaagctgtccgggatgacggtcgccgggaatccgctgtccgtgtcgtcgtcggcgtactccagcctgccgacgatcatcgactccggcacggtgatcacgcgcctgccgacgagcgtgtactcggcgctgagcaaggcggtggcggcggccatgaaggggacgtcccgcgcgtcggcgtactccatcctcgacacgtgcttcaagggccaggcctcgcgggtgagcgcgccggcggtcaccatgtccttcgccggcggcgcggcgctcaagctgtcggcgcagaacctcctcgtcgacgtcgacgactccaccacgtgcctggcgttcgcgccggccaggagcgccgccatcatcgggaacacgcagcagcagacgttcagcgtcgtctacgacgtcaagagcagcaggatcgggttcgccgccggcggctgcagctgagaacgccgagagcgccgccgaacgcgcacccaggcatggtccgcatggatacttgggtaaattaatgggcaatccatttgctattggctatactagctagcacgccattcatcaattcaaccacacaagctgttacataagcatggggatgaacatatcacaaggtagataaaaacgaattggtaaaggtgtttgctctagcgcttagataagaaaacacaactcaaaaacaatattagcgtaatgttaattaatttatgttgtcgaggccagggggtacagagtatttgaaagtggaacagcagaactccaaatatgatacactacacaaatccagtagaggtgacatatatagcttgtcatgtagtaattctttggcaagtactggccgaaatgtttactctgtaaatgtaaattaatgggtgtgtgtgtgctgcgtttgtagcttcttctttagtaagtacaagagctccaaaactgtaagcctgtattcgtgtgtgagtactttggacaatgaaatcaagttggtttatatactccaaagaaatatatatattcctgctatctgaattttcagatacttttgcaaatgtatgattggacatccataagccgaacaagttgcactggttgttacgacgagaataaagagagtgagagaggctttagtcgctggagtgttgcactctcttcagtcttcaataatggcaacacagaaagcgcaaccgcacaacggcacaagtatagtcaagtacgtataccgcgcgttatgacgatgggcgaaaagatacgggatgggctaagacgcccggcgacgatggcgaggcatgcatgccaatgcaaaccattttgttcttacgtcgaagcatggttctactcctccctagctggtctgattctctctacattaatttctactttttgacgaacacgaatggatgccaaatggagtattttgacacgttctgaaagcaggcaagtactgcaagacattcatcggtatactcggagttgtaagagcaactttaatagtatagccaactactaactttaaattatgtataaccaatgtaatagccaattcatataatagttgtttactacactattaatatctggtcccacttatcatacacacgttatatcttgaagtccatgctgcagctggctacaaatctatagcctgctgctattctctcttttcttttatctctttaaaatatatttataactggcttatagtctgctattgtatctgctctaatggtcagttactcagcaacagtttttgaacgttggctaaaagaaacaaacctggtgctgatcgaccgccggccgggcgacggctaataacttggacttcattaaagcacgtacaccggctggtactctgcatcgatccgagcatgttggatcgattgataatctgatccttttccggctacgtatccatcacccgagtcgtcgtcgtcgtccaccggtaacacgtcgccatccacccgacgcggcacgccatggcacgcatgcatatgcatacattttccggtgcgagtggccgtcgtgccagcctccatccaaccaggtgtgtgtgtgtgcgggctatctgggaaaaaaaaagccgagaggcgccaatcgaattcgatcgcgcgtacaaggagggtgggggtgcgccgtgctgcgtgtcctatcgaagcgccaaagagggagacgcagacgcggacgcgcttgttgacaagaagcttcattgttgcgtgtggaggttagactttcggaggattgggctttgatgtgattttgggggcccggtcgggtgatgtgcgcactgtgccctctgcgctatagcgtatcgacgtcgacgtgttctggcgtgacacgtttcctcgacatggacgtgtgaggtgtgcgtatgtgtgtgtcaatttccttcgcgtgactgtttgtacgtttcgtttacatgggcatgcatttatttggcggttttgcttgcagtagcacaggagcacacgcgtgggcgacatacgcgcgcccgaatcggaccgcgcgcttaccgttttgcttggcgcggtggcacgacacacatgtggttttcctttcctcgccggattggggctgtgtggtggggactacgggtctcacggcgtcgctgccgctcgctacgcggcaacgagccaacgacggcctcggccgggtgggtggctgcgcgggcgtagagcccgtgggctatatagctctttcgctcgcgcggccacgcgtgcgtagcccacgagtgtttgtgtcgcggcggtgggtgcggcgcatcgctcgcgtcgcgtgggccgtttgacgttgcaaccgcaggtgggccggttaccccggctgccatgccccggaggcctggagtacagggccgtgcgcccgtgctgcgcctttgcatgaactcatagcactgctctctccatcccaaaataagttttacactattcacgttcaatatttgatcgttcgtcttatttgaaaatttttaataattaatatttttattattattagataataaaacataaatagaactttatgcgcgactaactttttttaaatttttttataacttttttaaataagacggacagtcaaacgttagacacggattcccacggctacacttattttgggacggatgtagtacatactaacatacactacgcgctgcaactttttttaaataagaaaacacggtacaaacagatgtctacaacacgtgttagtgttatgctacaatacattgctaccactccgagcaagaaaagtttagcaacagctcgataagtgtatgctagcatgaagaagcgtgccaaaaacactcggtgtctctcggtccgctagtggatcccaaagtggttcacgatacttttcaggattgtttgtttgtgatgctgcgccattagattcctagtaattgagctggtatatgactgtatatctcgtagattgatatgactatatctagtagttcgcttgacgttttgtatctttcctcgtcccttttataactttcttctcataacttagtcaccaccaactcatgctgacaattaacttaattattgtcggctcaatctctcttagtttaggaagtgctcgtacacatggtcatctaaagtcggaaagctgatagcatctaaatggctgatgaggtaacctccaacagtacaatgtacacattactgaagtaatttggatagccatttcacttggttatctcaaaagcaaagcaaagcttttcctggaactaacatattttctaaaattttgattcattccttgtgggatatatatggctcgaggcgcaccaccaaaacaacggcatactgaatggtttcgacataatgcgtcacagtctcacagatcacactggctccagtgctcacatatatatcaacacttatttacaaaacagaatgaaaagtttcgcgaacaagcaaaaagattgcacatcagaaacagagtggaaagttaagtgctgcacatcagactaaaaagataaataaggactttgtttatcactcctcatagtcagcagctccatgtcattaccgtgtggtgacagatcataacctgaagatttgatacaagtatgcatacctctcaacaattcacaatacagtaaaataaaattctagatataacatatttcatctgtgaggaagaaagaactctaatttcccttatctgttttcagtgtctgtgcagtacgtagacgataattaagaagactaaccctgaaaaaacttcattgtccttctccagatactctcatccttcataagcaacggaatgcggctgctgcttactgaacctgaagctgaagatgcagcagcctttctcctggctgcagtcgctgggaagtgaggaacagccggcggcgtgctgccgatgacagcgtacggtgggtagtgcgagacgatcggcgtcgaggagtgcttctgcgtccaagccctggccttctcctcgtacgcctcgtactcgtgcttgtactgcttggcgatgcagcggttggtcgggcggtcgagcagggggtcgaagaggacggagacgaagcacaagaggagtttgttgatcgtcaaggccggtgaccagttgtcctggaagatgtccagcgccatcctccccttcccgtcaatgttcggatggtacacctgttcatgagattgaaaggtagcaaaacaaattagcgagaactggcgatgaacatgagcaatcttggatcacgcgacagatcgaggaacgcgtagattacgcaagcgattaccttggtcttgaagaagagcttggggggacggaaggggtaatcgtaggggaaccagacgtcgacggggaacacgccgccggcgtagggggtggcggcggggccatcgatgaccacctcccagtggaagtggtccttcacgggggatggcccgggccggcagtacggcggcggatcgagccagaactgccacagctcgcgccctatccgtctgcgcgcgaccgccgccgccgcggtggatcgcttcggctgcggcggcgccgcggccggcagctcgctgcccattgttactactactaccacgtatgtattgcacgccggccctagcggcctagcgcctgacgggcaggatggaaactcggtgtggtgagagagagagagagagagagagagagagagagagaggcgatcttggggttgataagtaccgcggggaggtttaggagagtttggagcggatattccggtttattgttgggcttagcggtgtgttttgcatcacttcgtttctatgctccccatgaacaattttggctccgtgtaacggccgccgatcttgttaaaatggaaaatgcagcacgtcaataaagcagtagaccacacggcgccaggtcacttatattggctattctttagggatgaacatgagtggacttctctcgtaatcgttgacccgtgttagttcaattaatattattgtgtaatgatgctacacttgtaaagttgataaccaaaaactcccatagtactaaaatataaacatttttagattatggtaccgtctctgatatgctactttgaccaacaatagctataaaagtaatatgttttaaataaaaatggttatatattatgatagtttgtttaatgatatatctagtaacatcaattttacatgagtgatcttttttatttttttgctattaatatatagtcaaaattgaaaatgtttgacttgtcactatgctaaaaatatttatattttaggacggagggagtatatcttattccactatgagtgatatgatatatataggcttacttgttgtaatctatatggtattaaaaccacgaagtcgcgatgtcatatagcaaaatttaccttaagtctatcaaggttatctttttatggtaattagggatttgttttatcatctatttgttttttttattcagttcatgagttaaaaagcttgttagctagctgtgtgctatataatagaaaccgagggtataatacatttctattatctaagaaaaagagcgagtcaaatattacccgcgaaaaaaacattacccgcaaaaatcaaccccaatgcccatctcatagttatttacagaataaaataataccattctatgcatgattgtaatatttatattattgttaactcattttcataggttgggagcttaattagggctgaatatgtagttttgaatttttgatatgttgattgcaacaaaattatttgaaataatgttatttttttggggaagaaataatgttatttaatagaacactaaaaatgtattatcggatttcaattggttgtgacaattgcatcctgtgggcaatattttgtcaacaatacaactatgtttttagtagatgatgtcattgatttttaacatgacgtttaaccatttgtcctattaaaaaattatgcaaatatcatttattttgttgtacatgttttactattaaataaattttaagtatgatatatattttagcatatttacactatttttttaagtagagtgaatgacccaacattatgaaaaagtgaaatgcgtcatttaataaaaaaacgaaggtagtctttagattgctggttggggtgctatttaaatttctactaaaaatattgtatattaattatttaaaaaaaatgactgcaatgccatgatgatcgaaggcgtcatgctgaatgatttcaacataatgtcacacacactaacacttatctgtaagtgacacacccgaacaattaatggaatcagctatatataaccatgaatctaatcgacgagccgtctagctaggtgaggtaacttgcgtatataccagcacattcgaggtatatatacatccgtttcacaatgtaagactttctatcattgcttatatttatatagatgttaatgaatctatagacacatatatatctagatttattaacatatatatgaatatgagaaatgctagaaaaacttaaattatgaaacggatgaagtaactcataattgacactactagtttacatgcctcccaatacttgtactatcaccaacacagtagacggtaattaggagaccaccagccctgaagaaaccctactatcctccctaccatcctcttccacaaactctcatcctcgatggatttcttcttccgccgccgcagttgatttagcgaagaagaagaagccttagatgcagcgacctgctttcttctcttctctctgcggttgccggaatgtgaggaacggccggcggcgtcctcatagccttgggtagccagtgcgaggcgatgggcgtggaggagtacctgcgcgtccattccctcgcctccttctcgtacagctcgtactcgttctcgtactgctccgcgatgtcgtcgttgatcgggtagtcgagcagcgggtcgtagaggatggagacgaagcccaggagccgtgaagcacgtccaccaccatctgcccctcgtcgtctatgttcggatggtacacctgcagcgatcgaattgcattcgtacgtacgagattgaagcatcaattgggatatctggcgatgaacacaagctagtgatctactcagagattgggcgagtgattttaccttggtcttgaaggtgagcttcgggggttggaaggggtactcgttggggtaccagacgtcgacggggaacgtgccgccggcgtagggggtgccgggcgggccgtcgatgatcacctcccagtgcaagaggtccgtcacgggttcagggccggggcggcagtacgccggcgggtcgagccagagatcctccagctcgcgggagatacggcgctgcgcggccttccgtggatccgccttcatccaccatctgcgcgccgtggtggattgcttcggctgcggcggcgccggggccggcggcggctcgtcgatgatcactgtcatgtatagaagtagaaaaagccctaacctccctgccgcctcgtgcaagataaataggaaggctggtacgatagacttgtgtggctcgaggcatatattgggctgggcatgcacgcacctggtcctgggtggatgtcatgtacatgggctgctgtgatgtccttccagaaggctagacaagtgggctagctttgggcccattcggctagggagaaggagactagaaaagaggcaaagcagccagcagccagggtcatcgatgaatcaaggggaaaatccaaatacccccctacaagtcactgctctttctactctcccccctacaactcaatattgttcaaaacactacacataagttaatttctcttccaatttcccaccctattcggttttcacgctttctctgatgcgctcaatttctcgttatcgtgggcctttagctcagcccatgagcgaagtttccttgtgccaccttggcggcaaaaccgcgcgcatctccatccactcttaattccgcgagccatacgggtaggacgacatgacgctaatataaaacaggaaaacaatttctagtccaccagtgcaaaacaacagtgtctgcctcatgattcgtgattccacatcaatatgaagaatggaaacaccaagtcaaaaacacattccagaatatttaagacatgcttattgaagtagaatccccttaaaaatcacaattcaaatctgatagttagaagtacagaaaattatttgtcgtaaaaaagatagtactgagattaagaagggatcaacatcccccactaattgtagctaagaattttgatgtaaataataccactgcataaaaataggagatcattttcttctaatttgcagctttcttccagtaggaccgatataagccccatctggcacatgatggtagagaccaacaccaaatgcattgtccatatatactggtggctgtgtggatgttgttggaatatcatctcttgaactagaactaataggctgggaattgctcctcttcttcctcctagttatttgtgttttacaccgagagaaacagacaacaaattgtgagaagtagcaaagtacaatgtctttatatgataaattagtagtgtactcacattttgagatgaagaactatggttgtcttttccatgctttctgctgttatgaccaaactctttgcagacgctacatctaattgttgtctttgcaaccgaccttccttgaaccctaggttcatcagatgctctagttctctttgtttttggcctccctggttgtgtcctagccacaggtgggtctacatctggaaatggagttttttcccattgtgtctcatcaggaacgggataaatcatcccacaatatgtcctcgcatatgcatcctttgtcaatatgtcatcaacatagctctctggcctttgcttgaaaccttgaatagctgaaacagcatgcaaacatgggattccagttaaatcccattttctacacccacaagtgtgcttgttcaaatccactacatattgattaccaaatgcggacacttgccaaatgcccctaccagcacacacagatttgcaatatcttgcctcgctcttctctgcctcaagcttctttaatatatttggtgggatttgccaattgtccctttttgcaccttccctcttattattgaaatcacccatcatttttatccttatgtgctcaaccatggtaattatgggttcatctctagctcccagtatctttgaattgtatgtttcacttatgttgttaagaagaagatctgtctttgctctagaactgaacatatatctacaccaatgcttggttggaaccttgcttagccactcccatgcactcaaattgttaacctttagttcttgcatagcagcattgaactcagattgtctatatgcatatgctgctcgttccatcaaacccttcagatattcccctctaaatcctgcttgggaaaaattggcatgtaggtgcctaaggcagtaacggtgctcagctcctgggaaaacttcagccactgccttgagtagtccctatatatggcagcaaaatgttaaaaaaacagttgacatgtattaatgcaaagtagacatatatgatagccattaccttttgtctatctgacatgaatacccagcccccaaactcttctccttttccaatggccttctccaaacatagtaagaaccatgtccaagattctgtgcactcagactccactactgcaaaggcaatagggaaaagattattgttggcatccctgccttgtgctgttagtatttgagaaccattgttgggtttgatgtgacatccatctataccgatgaagggtctacaaccacctaagaagccagtaatttaagcatgaaatgacaagaacagcctttgaaacctaggccttatttctggctcaggtgatacttcgcacttaacaaaaactttacttcccggattagcagatagcacagcatgagcataatcttgaattcttttaaactgcaaatcatgatcgcccataactttcttgtaggcctccctccttgccctatatgccttacttatgctgacttctacattggtatctcgcctgacacaatcttgaaaggcatgtgcatcccatttcttgtcagatctaaagaattccatgtattcattagtaagccatctccagtaaagctgtgctatattgtgtgatttcccacagttatgttttgaaacatacttttttattttaaaggtgtcttcaccaggcaattttgaagcatatatgtaccaaggacaattatctgccttacacttgacagaaacttgattcctatcattcttgcccttgaacacctccctcccctcgttgatgatcatattcttcaaagcagctctgaaaagatcaacattactgaacaacatgccaacttgcatgtgtggacgccgtagggtggactcataaaaaatgatatcttcaattcctcttgatctgtgcacatagataggtgcttcgtcattgaaatctattgtgtcatcattgggctcatctgacaaataatccacctcagctgattggcctatatccttcacttttctcttgttagtttttttccctactagttctttttcctgtgtagtttttcccggatgtggttctgcttggttaacctctgcatctatctggctagtaccatataggtcctcagtatcagagtctccttggaagaacattactggctccttgccaatagcaggttccttgccttttttcttttccctcaactgttgctgtacatactcttcatgcaatgtcaaatcatctttatcaaaatcacctgggacactattatgatgtccgattaatgggatactacttgggcttaaaaaccttgatgtgcttccattatcagtcactaattcctgcggcctcgcaaaaatgtacagtgagcactctgtttccgtcttatgatcatccaacatcatcttgatttgttcatcatttagaatcagtacaagaccttgtggagggacataagaaggcttcaagtagtatacaccatctcctttttgatatccatgtataagcaatgactcctccaaatcgatgaatttcagagaatccctgtctaaaagatagatcgatgaacaattcctttccccaccagatttcctagggcttccaccagttgtacaaccagtatgaacaatgaaggaaatactagttcgacccatctgcagagattataccaatttattggtttgcaacctaaatcaaagagcaaatattcgattatctgaatctagtaatacaacaattacatgcataaaacatgatccgaccaaaaccagggagaaaaaaggaacctgtagaatgaattgacgaggtgatcgaagtacaggatgcttcagtgcttccttctacgacttctcttgccgggcaggagatttgatatcccttctctctgtactatgcgatcatcgtcgtacttcgccgttgtaccgctgttctttcgctgccttagtgttgcagtagcgatcgcgaaattaaagcagggaaagatggaaagtggaagaaggtgcgcgcgcttttgccgccaatgtggcacgaggcaactctacccgcgggctgcgctgtaggcccacgataacgagaaattgagcgcatcacgagaaagcgtgaaaaccgaataggggtggaaaattggaagagaaattaatttatgtgtagtgttttgaacaatattgagttgtggggggagagtagaaagagcagtgacttgtaggggggtatttggattttccccatgaatcaattaccagaacgcctcaggcgatagcttcttcctccttgctgctgcttcccctctcaattcctattctctagtcccaatctcctgcttcctcttgtctaatctctcttcccagactatacctctctttctcctcaattttgtatccctaaacacttatattcttgagtggattgcaatatatcggtggcatttgtgtgagagatttggtgtgattgtgttggttcgtgacaatatggtatcagagtagtcgattcgtggggtttctggtgtggagatgaagtgggagagcgctggtggtcagaggaactgccagcaacttggtggtggtgtctttggaggagatgcccaccacctgttcgatgaaatatcgtcctgtccaagaggcgactcagctgctgtccttcacgtcaccgtgagccagatcatatatccagtgacatatgaggtgttgcatcaagtgtacgatacctatggagcagtggcggtgcaggttcttgcagtgagcacatggcaagtcaaggctcttgtgtcatttatgtccagccatgacgcggagagggctcggtccgccacccacggtcgcgacatctacgatgggggctgcttactggatgtgcagcacgtctagatgttccctggagatggcgccaccgccacgcacaccacctgtttgacaatggtaccaagtagcgccaccgccaggccagcggccaagagtattgctgctgcactagaacgcgtgttccctgctacaacagcttcatctgtaccctcaattacatcagcagccatggtgacatcggttcctttcaacgagaccaagaaggctgagactgacatggacaaggcggtggagaacttagacaagacctgtgcaccaagatcgatcggatgctggaggcatttcgccacaccaaggtggatttatccttgagcaaggattccactagagatgtggcagcgttgagtgccaacactgatccaacttccatcgcattggaggtcagtacagaggccggctcaactaaccatgttgacacagccaagcttggcatgggaacaaccatcgagtgttcaatgaagtgtgagaaccagttggctgatgatgatggtggcaaagacatggccaaggaggagtggatggagctcatggaagtggataccaagttcaccactatgtatttatgcttcagagatccattgttaatcatcaatgcaattcctcccaggaactggagttggtgcttgagccgtgactactttggagttgtctgcctctctttcgtttcattgaaattgcaagtactctatggttgctttgaccggagctcagaatacacagctagccctccaccagtaccaccttggagagcagcaattccatggaacaaagctgagatgacctcaggttctcggcctttaccatggcctgatccacagctttgtcaaggcagcggaggcatggtggtaaagctcttacaaccctggccgccacttattcaaacaagtgttcaaactgaaattgaaacactgaatttatatggtgagtctcatcaagtctccttgaactacagcgttgcccaattcatgagtagaacaattaattccactgagggcttgctgcaaaatctgattgttggatagtgtatttggtatgagatatgtctctctggtgcctttaggaaggcctatcaacacacacatcattcaacctatggttgggcatatggggatcatgaattgttcttgctgctcatgctgatttcccatccatcacccgatgcatggtgtgattgtttgttcagtggagctaatgttgatggtaattgcacttgcaagtcacatgagagacgtacccatcgccatgctcagtgctacactattccaatttcatttcaggttcagagtaacaacaatgatgtactagatgatacttcttggactcaattcggatcaaacaatggtgaggcatttagggtttcaacaagaaagttggtcaacttgtaaccttggcctcctccttcgcaatggaggagtgaggtattcagtttgtgtgcagcaggagggcaagggctcaatttttcttggaagtgtatatctgaagggaaactaatgttatggacaaatgtgaaagttattagaagagaatatacaaacaaggtgttatggctgtcagttgccaattcttgggatttaatatgggcagtgctacaacagttgctatgtacatctgagcttattcttcaatggaatcaacatgggcagacacatgagctattgttacaaagggagcagctaaaacttggtgcagtccatctcagtttggaagctagcactttcagtaagaattctcgtggaatagaactggttaaatgttcagagagatgcctcatttgtttagtttgtgaggacaacatagtcttgcacacatgggcctatcgagtggttaaattagttgctgcaagattggttggtgatcaaggtaaaaccatacaatttttagcaatctgggagtttgcaaacaaagaagtagctctcattcagacaaagaagcatatgcatgtttctcagtccactgatctcaatatttgcatgttacatctaggctctcatggagtatatgctgatagtagtggtgaagaaggcgtgaaggcttggtggttgaggcagcaaaagcatggtagagagtgtggttgtaatgctcaggttttatgtatgctggataagtggattcaacagtgggcagggtctacatcagatggttcgaaggtcatcaaacaattgttctgggattctgcccaacaagacatttccctgcaggtaccctaggatcttgggggcattaatctggcgagtcagttgcatcggcttggggacaagccgattcttaacgggggaagaatgtcatgtacatgggctgttgtgatgtccttccaggaggctagacaagtgggctggctttgggcccattcagctagggagaaggagactagaaaagaggcaaagcagccagcagctagggtcatcgatgaatcaattaccagaacgcctcaggcgacagcttcttcctccttgctgctgcttcccctctcaattcctattctctagtcccaatctcctgcttcctcttgtctgatctctcttcccaaactatacctctctttctcctcaattttgtatccctaaacacttgtattcttagtggattgcaatatatcggtggcatttgtgtgagagatttggtgtgattgtgttggttcgtgacagtggacgagcgagccaggatcggcgcgtgcaaattgcacctccgagccaggtcggagctactccaccaggcccggcccatgtgcgggtgcgggccgagcgggtgcagcgacacccagttagaggtgtcgaggcaaggtgtgtgtgcagtgtgctctcgaggttgaggggtgtcgtcgttgctaccgtcttcctcttctcaccattgctggtggtcctcctcgccaccctttgccttccttcatgctgacgtcccagatccgatgggcttgagttctaccaaagaccgatgattgcggtagagttctaccaaagaccgatgattgcagtgaacgtacatacggcggggtgcaagagggcagaaagatatgcctcgagctgccagatcccgccgtcctcttcttctaacttagaggtgcttacatatcatcccaaactttttttaatccactataatttaacatacaaaattcaaatctatcaataggtttgggatatatatagagccgcaccaaacatggccctatattaaaatataagaaaaaacactaaaccagtacattggaggtgtatttatgccataattggcactatatataccaaaagaaaatataaagacaatttttccatgtgttgttatgctagtctctacgcagcaaacggtaggagaccagctttgagtatacttgactacccttctccacgtactatcattggcggatccactgttggggctcgttgggtgttagccccacctcgaatccctatccctaattagtcatttataagtctaattagatattaatgaaaaaaactgtcgtcatgatcgaaccaggaggagggaggaaacgagagcgtcaacgggggtaccccgaaatcgccagcgttccccatcggcccacatcccccaaggtcaatgctgcccgggagaccgccacatcagttgcgtcaggctcgtcaccatgttcgcctctacaatttttgttcgatttgaggatgcgatgagtagatgactgcagcgaagaaatggtgacggtgttctgctccgacttggtacctgaatgcgaaagtacaaatttgtcatcccaccatcaacagcattcgaaacctgctttttcgagagatgcagtaccgccagcgccaagtaccaagccttcccaggccattagattaagtggaatggatggctagcatatggtacctcctccattcaagaactgacctctttttgggcttaccatatcctctatattctcggtttagttgtgattgaaaacatcgtcggctccaacagaccaacacataggcctcttcaatggaaaatgcgtactccccaagacaaactatttgtgcatggttctatacctcaagtgtaaaaaaattacaccatttaacattcaggaaacatgctcgcaactaacaagaaatgagggagtagccaatccgagaatcactttaaaacatagccaaagtcttggacgtaatttgtaaaacatgaggagcatggccttccgtgtgccaaagagagaaggaaaaaaaatgtggagacgggttacaccagttttcttttctcgagagaagggtttgcttatttccccacggactaatttggagccaaacaatcaacatttccttatcactataatgttctgacttgtgaattctagaagtctcaatatagacctaaagtcttaaagatgccaactcatcgaacaataccagtcgctcagacaaactctcgtcagcacagccttcctgtactaatcacgtacaaattctttacagccacattagaggtatatatatatacctctcaagtctcaatacagtaaacatataaaccattctacacagaattttcctcgagtttgttcagctagtctgtatgaagtagccggtaaggagaccagctctgaatatacccaattaccctcctccacaggctctcacctgaacctgaagatgcagcagcggcagcagctcttctcctagcttccgcttccgctcttctcctggctgccgtcgccgggaagtgaggaacggccggcggcgtcctgccgacgacggcgttgggcgggtagtgcgagacgacgggcgccgaggaaaactcccgcgtccacgccctggcctccgcctcgtaccgctcgtagtcgtacgcgtactgctcggcgatgtcgtagttgatcgggtagtcgagcagcgggtcgtagagcacggagacgaagccgatgaggaggccgcggagcttggtggcgcagctccagctctcggcgtccagcaccatgttcccttcctcgtcgatgttgggatggtatacctgcggttgcagagacaagcactcaaattcgatccatgcaattttttttgaaagagcaagtttcgtaaaactaaaacccaattatcatcgtccaagttacacaaaaccataaacattttgacacatgacacataaacccaaaatactatgtttttaaagttttataaaatcacatagttaaccattttgacatacttctatattaaaattttaaaaagccaggtgtaacaattatacaatggataaaatccttataaatttgagatgtaattgtagaattaaaaagtgtggtagatcaaagttaaaatgatcaataccgtggtttcgtgaaacttcagaataataatatacggggttacgtgccttacgtcaaaacctttataattttatgcaatttaaaccatataacagatgaggttttaagacatttgcatcacgcaaaacggatcggaggaacaagcagagatgcagacgagcgtgcgcttaccagagtcttgaaggtgaccttggggtggacgaaggggtagccggcggcggggagctggatgtcgacggggaacgtgccgccggcgtagggggtgccggcggggccgtcgatgaccacctcccagtggaaggggtccgtcacgggctccggcccgggccgcaagtacggcggcgggtcacgccagagcagcctcagctcgttgcggatgatcctgagcgctgtcttccgctcctcatcctgccgtctggccgccgccgtggacagctccggctgcggctccggctccggcaccggcgccgtcgccatggccggcgattcgctggtcattgttgccacctcgcgagcacttgcgtaatgcacgtcggccctagcctctctgccgcttcgtgcagtcgtacgtgctactcggtgtggcttgagagagagagatcgggggttcatgagatccacggggagacatcgttatatagtagagatgacgatcgttctaatcgtattcggattcggatacgtagtggcgagttcgaaacttcgaatcggataatctgtttttggtttgggtttacctcttttccaacggaaaattacgtattcggagaacagaaggcgtcatattggattgtcatcttttaaaatggtaatggagtattcgaagataaggcgcataccgattttacgactaattgtcatattgtatcgacattttctttaaaaaaaataaaattcattccggcctactcatccggagagatctccctgatggactacaagactgcaatacgaatagcacgcagatagtcaaaacataaacaagataccgccactctagccaaaccagctaaaaggaatgaacctttgcacgatcacatccgaagcgaaggcaagcacaaagcacaggcacaggcgcacagcttccacccagaaaacaccaagaaacttggcttcggttgatagatagacagatgatgcagttccggttacagcatcatcgatcttaaggttcacatcacatttctcactgcaacctaacacatgatttggcgcactaccctggtacaggctataggcatctctgtacattctttatatacacatacagaagggtacaagttttattaattgaattatcgggtaaacgacttcaaattctgatttgggatacctaatgtatgatgacaagattcagcacagggtgcacagctgaggcacagcgcgcccaacgtctgctttgtgttcctcacctcaacacagcgagtcaagatacgagtgattatacagacggccaaactggaggaggctgccgtatgttctatcccacacaccgacaaaaagcatgtcggtgtccgggctgaaagacatgccagatatctcaccaaagaagtccagctcttgccttctggtgtaatcactcccgacatcgaagacgtggacaaagtccgctggttctgccatcgacatgaactgcccatctgacgtgaagcggattgatcttatggctccaaggttacccctcaaaacatggagggatttagagagattccgcgcatcccaaatccggcatgtcttatcttggttgccagtagcaaatgttctgccatctgggctccaagctgatgcaaacgagtaatcaaagtgacctttcaaggaatgaagagtctgcacagggaaacaaagtaaccagttatcatgcatgccatacttcaatgtcacataattttctatcacagcttggttatcatatatatgtgacgttttatgcccaggtttgcgtgtgtgctggcatacctttcctgaattggcgtcaattagtaaaccattaggatcatcccccacaataacagcaagctttctgtcaggactcaatgctgtatgctgcatcaccaaaataacaatgaattgtgagaccagagtacagaaactaaaacatccaaagcattccattggttttgatctccgtatactgatgttggatctatttgttaacaacacatttaaaaggcagtgcacaattatgttttcatgagaaaaaggaaatcaaaaggttttatcttgaagagtcattattcgacaccatgaagaaagaagtacagaaccacataaagcgaaactatggcaatgtgaaattatgaatgtctacacaatcatacatgcataccctaattatagtaggtttaccaaaagcaaggtgtcacaaataaacaaaaaagacttacattcactggccattcaaactgaaaatgcttgtagagctgaaacctctccatatcatagtctcttacaccagagtcattattcgatgccatgaagtgaacagcaccactggggataaaacagtattaatacagatgcaagttcaaaaaggtcacatctaatgaactttataacagaacaaggcaattacctggtagtattgaatatctcaacagcattagtaatagcgttttcatcatatgtagttcgacagcaaaagctaattccttctcgatcaaggtgctgcatttcccatcaacaaagaattaagaaaattttaaaaaggataaacccagacagttcatatgcagattaaggctgagttcggcacttcatcttcccaacccacctctctcgttttccacgcgcacgcttttcaaactacttaacagtgtgtttttcgcaaaatttttgtatacgaaagttgctttaaaaatcatattgatccatttttcaaaaaaaaatagctaatatttaattaattacgtgataatagaccgctctgttttgcgtgcaagagggataggttcccatcctgcactgccgaacacaacctaagaatgtaataagatgcacatcatgaattgtttggttattttccagtaaaatctgcataaaatagtatccgagtcgcaaaatcagtggatacaggagcggaactgggcctagggcagcttggacccaagccctacttgtgaaaaaaaatttagtggactagtacctacatatttttcagattttcccaaattctatagcccagccccacacatggcctgtttcagcccccacatctctcagcccaacaaccagcccatcacagcccaatagaagccaaccctaatcccacctcctctctctcgcgcatcacaccgcatcaccgagcgccgcatctgtttctgttcgcgttctttctcttctcacgctctcagctctccgcctctccttgtctgccacatcaccgacggcgactggcgactgcgcacggcggcacggcggcgggcggcgacaagcactagtgtcggcggggcagcggcgcgcatccgcggacgggaggcgcatatcagcagcaggcagtgcgcaggggggcagcagcagcagcgagccagggaggggatcggccatggctccggcgcagtcgcatacgcatcggcggcaaggtggtgacggcgggtcagagcctttgaggcaagagcgccccctttctcagccacttctccacaaagtttgattcccgtttccccaaatcaagatcagtgtcctctctactcatcgattttgcaagtttattttgcatttggtagcagttagtcaattagaaattggtttgatttgctagatgaagaggagcagcactttaaaatcattctaccaagtccagtccagtgagtccactccaaccccagaaacagaagaaattgatgaatttaccccaaccagaagatactgttggaatataaagtgaattgcccgcctttcctcattagcttaagcttttgggctgaactggtcggtgcatgcaacacaatatggtattagagccagaggtctcgagttcgaatcttggctggcgcacccacttctattccacgctagaggcttgagggggcctcgcgtgaaggggagtgttggaatataaagtgaattgcccgcctttcctcatcagcttaagcttttgggttgaatagatacgtcgcgttaggtaggggtgaaaacggtacggaaactttccagattccagacctattttcgaaaacggaatctgtcggtcggaattttttggaaacagaaacaaattcgaaaatattttctcggaaacagaattggaaatgataagggcaattttcgtcggaactcggaatcggtcggaaactttcaagatttcctcggaatttctagaaattgtgactgaaatatcctggattctttttttaagcactgaatagtgaataccatggtgtttggctgttattttttaaaaaaatatttgttatgcaaatctgaagttacataagaatattttttcctgcattgagatttatcaacagcattactctcttaaacatagttaatttattccatagattgtgttttgtgatgtactgttgagacttaagaattggagttatatgattgtgttttatgatgaattgttgaccgttgagacttgagaataggatttatcaatttgaggggtttttgtattccgataaattttcgttactgtatttgcgccggttcgttttcgctttgttttcggtttcgataatattcgattccgtttcatatccaaggtttccgattccgattccaattcccaaaaaaatatgaagacgaaaacaataaaggtggtttccgtctgtttccgtaccgttttcacccctagtgttaggtactcaacaaaatcttagtctagtcttgtactttttctacacttttattgtacttcggtgcatatttagaaattgtattccagtcttgcattttttttcataattgtactgtacttccttgtacgaattgacatggatagttgttagccttcaatttgagccctaggcgtgtcaagatcctggctccgccacttagtggatatgttgatccaccatacacatgttacttcagcattctaaatctcataaggaccaattccagcggtgctcacctatgatatttatgcaagcgagcatcaccaaactccaaaataacataaactgtttaatcgccatagagctagaatatatgccggttgctcgaagctacacagctatggctatatggattgattcaaaggaaccagaatcaattcaaataatttaccttgcagattagctctccttgaaacccaccagctaccagcaaattgtccttgactgacaaggtactaacttgggtcccagaaaaaccctcaagtaaacttccagggtgcttctgtaataagaaaaacatgaaacatcaatactaatacataaaacttagaagcagagtaaataaaaattgatggaacaaagaaaaagaaggtaccatacctccctgggtgccacatgtccttggacattcataagctcggtatcaagaccactcagtgccgaccaatgaagaacagagaaatgtgacattaaatagacatcgtgcttggatgtcgcccatactaaatttctcagctgcgggaaaagttaggtcaattgtttcataatctctgcaattgtgaatcatatcatataaaaaagaggggcatcaatcaagaactaataatcatcagagacatagaaacatcttcatcgaccaatttacaagtgattctaagaactacaaaacaaggaccagcagaaatccctgaatatgctaagccattgaaagatgaatagtttatcaagaaaggcagtgcatagatacattagtcatagtgaaataaaaatcaacaggccccaaatttttcacaattgaataagaagatgacatcggttctttttacagcaaacgcatctcaacatgtatacaagtctttttaactcgaaagcagcaaaatagttccctgcagttaattgtaacacactaatacaaagtacaaagttgataaactaatacagccaaatgaattgatacaaaaaaagtcctctatttggaagattatcaaatcaataaagatgcactttgttttaatattcaaaagatattgtacaggaatattataaaggaaatagatatgattttgacacttaaacgagcctgaagctaatttggttaatgaaatgtaaaaacattatcttatgaagttatgatggaacgctcggaatctaaatactaccaactagtgcgatatctaatcaattatttctgataatagtggtggaatattatcttgaaggggaagtaaaagatgtaaaagtgagcccacctgaaaatgtagtatagttgattttactgatctagtatttcgcctaaattcataatacatcccgcctttttcagtcggtttgcattcctgtacacaagtgtcaactgtcaagcacaaacacagacagttctacacagtgagctttcaaaaggacgcacctttgcggctgcttctccagaattaggcatgttctcataattcttgtactgatctaatctggtctgtctgtatttatcacgtgtgatcgctagcttctcccatggtattccttgaatatcctttccttttcttgcatcaactgatgaggtatctgggatcttatcattctacacaggaaggaaaaacaacaatttagagcattgcagtgtggtatatttaataagaacaatgatcaaattgctactatatcaagaaaaccatacatgtagaaactctagtattggtaaagttgaagattactattattaagaaaatacacaatttgttctttatcaagacatagcatttgcatagcaggaaactagaactaaacatgtggcaggaattcttatgtattcttacagagtaatactactccctccatccaattttgatcaacacatactgttgttgcacgagacaaaggagaaccaaatcaatccgtaaacaacagacagcttataaggctcatgattctcaacagacaacagtacacacatgcagttagtattgtcgttaattggactcggatagctctctaaacaggaggatctgtaataagtatctcgcccaattgcacaaatgttcactcatcttacgctcctcgtcatcatcagtgaatagtgttccaacaaacaaaaaaagaacttcacaaaaaataatgttgcgaaaacttgattacacatgcaatgaatcaacaaagagagaagattggacataccgactggccatgctcttcatcctctgaatccgaatccctcatccctcgctcatagttctcttcgcccatgtcatcagcagtgtcgtccatgtcataatcatcctccatctcttcaatgtggtcttcgtgataattggacattgatcctcacgtgaagataaacgtcccccgcctgcaaacagagcacaaccatcagaaaccagagtctcaatcaaaaccaattgcacatcaagcaaccaagcatttctaggcactcctaggtcaatcaacaatttgcagcggttgccatgaccacaccaaatactagaagctctcctaagcagtgagaataactgaataagacagaccacaattccaatttgacttcctatatggtctgcaggaggtcaatcaaaaaagaaaaaattacccaatcagagatccaactgatccccatgcctgtattgcaaatacgccccaaagaactagtagttcctaccacggagaaatgaaatccaacagaaaaattagaccaactgctcaaggcagacctaacgatggccatggggattcacccgaacccccaaaaatttgtccaacacaaccttctaccggtattaaaccacgcaccagcgaaatccagaacaaaatggatggttaattggaggaaatccggacggatttagccggcccacatcaagcgggacgcgggggaggaaggcggcgggcaacgagaggggaacgagggtaccttcaattcgatccgcacggcgacggattcggggtgtaaggaggccggcccgcctcgcccctctcgcccggccgcgcgcgcgactacgccgacgacgcctcacaggggggaggaggctcgagcggaggcgaggggaaggggaggaggaggccgcccaccaccgtgccctcggggcgccctctcgccggcggcgcgggcgaagctgcagatcgatgggcggcgatggcagatcggcccagagggtaaaggtgaggccgtggccgtgggagaacgaacggaacagagagaagatggaggaagggggcaacttggtcattggctattatttttcccagtttagtttatttgaaattaaattgaatatttctcacacttgaaaacgagaattctgttcaaaaactgcgacttattatacggtggtaactgaaattatcgtaaacttagcttttaatgatcatagtagatattgacgcgttgtggcgggactttaaaattttttaactggatcgatatatcatagatgctttgatccaatagttaagggttgactgaacatataaaaatagaggatatatatgtttcgttaaactgaaatagagggtacgtgggtttcgctaatctaattttagtagggtactctctctatctaagaaatgatgtacatataacttgtttttcttatccacgtgtaatccccgtatcctctacttgatgcatgtgtctgtttgggatgacacccattgaatgacttcactacatgcatgcacaacgatggcgtgaggtgatacacaggatttggtgcgatgggcggtgatggcgatttggagtaactaactcacggcattgcaccatatattgtgcgtctatgccacagaagacattgggactgtatttgtatttgatgtgggttaaattgtaaatgggagagattttgttctctttggtctcaatgcccaaacgaaatacaccagtcaaataagcagtattgttggtcttaaattctaaaaggagaagaacccttgatagccatggagaagctttgatatagagataaagcgaacaattttgtgacattttctgaacttgcaaatatacaaattgctgcaacctataacattaaaaactggagttatcattccaaatttctaacactaatataacttaactttaacatcataatatatatagccaaagtctaaaaaaaaatgaattattccttgttaacatatagattgtcgccactattatgcatcttctatacaatttatatattaatgtaaaaattaataagaaaatatggttggggataatagtggagccacatggataattttgagttactcaatcagtgttgtctacatgtaggtctttagtcctcaattacaatgtgttatgttattttaagtatgttttcttcaaaatttttgtatcattgttgttgtgttccttagtgggacaagccatatgacctagacatggatatcacggcatgagaagagcagatggtgatatatgccaaagtgacaaaatggtataaaatgacggaggttgcctctaatcgtagaacatggcattttgttcacttcggttttgatgagtcatttcggcagtaccacgtgcatcgacggttaatattcaggtcactctgctaattatcaggtccaatatcgtagaagtatagtgttacaatttctataagcatgcagaagtttttacagctacgataaacccaaagtcacgagatgatttttgtgtgtccatggtttaaaaatacaaatggttattgtggttattggttcatcggagaccaaggggcattcattggattgaaatatctggatttcaattaagaaataatctagaattgctccaatcgactaaattctgactacgaggacatgtttagtttatcattgaaatcaactttaccaaattaccgaaatttgaaagggttaaatgggtgaggtgttcggtttgatgtcttgtcaaattttttgtgtggttttatgagtggaatgtttcggaactattaaagtttggtaggaatgacaagttgcgatggtaaaaaggtatttgatttgttgccttggtttgtttcggtgacaaaccaaatttagtaaatatatgatacaatcataaaatctacggtgtaggtaactccagccagctcggtattccaagttttttaccctctcaagctctcttttgagcaagtttaatagtatagctgactactaactctaaatcatctatagttaatatagtaactataatagctaattcatataatagttacctgtaaacatatactacactattgatacatggtctcacctgtcatatacacactgtgttttggagttcgtactgcagttggctacaaatccatagctcactgctcttctctcctcttttatctccttaaaatatgtttatagtaggcttatactccctccattccaaattgatctacatatagtttttttgaggttattcctaaatgatctacatatttgtgttcataaattaagtctattcgttatttgtgcattggagtaaatggacattgatgcatgcatccatgcacacaagtatttataactcacatgcaatatcttgatttgctattggctaggagatagtggggatggtgcatgcatcgagtttgttgctagagtaaatatagtatgagagagttattagcttttattggtcttggtgtacctatgaaatatgtagatcaatttggaatggagtagtctgctattgtacctgctcaggatgcgtttgaatgtgccgttggattgtgaattttcatgacacgcaaaacgagcaagccattagcgtatgattcattaaatattaaattttataaacttgaaaattattttaaaaaaactttcatataaaagatattttaaaaatatatcatttaacagtttaaaaaacttatgacggtttacgagagagcagtcaactccaaactcactttacaactcagccatatcgctgggactaatagccgaaatgcacaatgtgagtatgtgacgcgaaaaaaaaaatccattttcttttctgctctaacaagttaacacaggctaatagcattcacacacgcagaggtcaaaggataaggattccaggcatatgttgggaccgacctaaatttaattgtggcaccctttatctgaactgtcacgaggaagctatcaaaggattgtgctcaactgttgtggctgtcggtccaacagcctgcatttcttcacgtccatcttctcaccaaactgagatagttgtatctttctgataagaggatgactggcagcgatggcatttcttcacatccatcttcttaccaaacgatgtaattgtagggttttttttttggcagataagaggatgccagcgatggcaacagattacaaggtagaaagattatgatttgcaatgtgtttttgcctaagcttgaaaaagtagtggtgatcaggtatccacaaatgttcatttccacgaaactttggcacactagttgcagcagagctggggcggaactagaacaaaatggagggtgcctcttgcttaatttactctactttagatcaagttaaagctgatacgggtgtctaagtttgtatttagggggtacacatatggtgaaaatcggtgagttatagctaaaaaaatttcttgaccgggttcctgggcacccccatctcatattctacatccgccccggcagcagagtatggtttgcaacttccattggacagttatacttgaactctatgttcaaagctccattccaaactcataatgacataatgtaactacaagcagttttatatcttagaaacaccatattcacataaacactatcctaaagtatagttctggaagcttcctcgtactcatcagacttaacaattttatcatgtcccaatactcttactcgagacaaatcctcgaagctaccttgattccatgacacgaatttgaactactaggcagagtggcaggcatgccttgatttcgagccaaagataggagtggttatacagacggtcaaactggaggaggctgccatatgttctatcccacacaccgacaaaaggaataagttcacttagtgacacttaaaagtgatcgaaatcaaattcgtaaccctaaaccacaaaaccggatatcttgaccccccagctcttcaaaccggagcaatttgactccctcggtggttttagagggcggtttcgctcacgtggcgcctacgtggtagtattgactcggtcttctttccacgtggcgttgatgtggcgcttaggtggcattagaaataaaaaaaagtgtgggacccatttggcatccaccgaaagtgtgggtgggacccactgacatgtggggcccacataaatcatcctctcttcatcctccccctctctctctcttcccttcggcgagcggcggccgtgtgacggctgacaggggccagcgatgcgcgggagctggtggcggcggcagcagcggcgcgcgggagccaccgccggcggaggcgggagggcgggcgggcgagggcgggtggaggcgcaggaggggaccctggtgacgacgccgtcggtgttgcggtagtcgtcggcgacggggtcgtagacgaggcctccaccgccatggtgatgaccctggtgacaacgccgtcggcgttgcggcagtcctactccaccgccgtgcagtgcctctgccgaaagggcgcccccgacgaggccaaggagacgctcgacgagatggtggcgcgcggcttccgccccaccgtcgccactttctccgccgtcgtcagctgcctctgcaagcgcggtcgtgtcaccagggacatggcccatggaggtagcaaccgaggaggttggagacgagagcggcggcggcggcgggcgtacgaggggcggcgggcgagcgaaatctcgggggcaccacctctcctccctcccttccggccctcgcccaccgccgccgccgcacgcgtctcggccttcgcgcgccgccgtcgctgctccggccctcgcccgccaccgccgccgctccagcccttgtctgccgtcgccgccgccgctccggccccgcccgccgctccagcgcagcaaagggggagaggaaggggagagagagagagagaggggggaaggaccggagatggccaccacatctaccgccctcgttggccctcgcccacccgctcgccgatggtcgccgccgccgtccccactgcccgctgatggttgtcgccgccgtccagcacgagcctgtcgatggccgccgcatcgccgtccccgccgccgccgctactcccgagtcccgaccgccagacgccaccgccatccccactgccgcttcggtggtgaaaagaggctgggggagagaatgagagaagggagagaaagggggaggaggaagaaggggaggagattggatgacatgtgggccccacaggtcagtgggtccccatgttagtggccccgcatgtcatcctccgtgtgaatgaaaaattaattattttttttaaattctaatgccacctaagcgccacgtcaatgccacgtgtaaaggagacccggtcaataccaccacgtaggcgccacgtcaacaaaaccgcccagggagtcaaattgcaccggttttaaaagttttgaggctcaagatatccggttttgtggtttagggttatggattagatttcgatcacttttaagggtaacaaagtgaacttattccccgacaaaaagcatgtcagtgtctgggctgaaagacattccagatatctgaccgaagaagtccagctcttgccttctgttgtaatcgttcatgttaacaaaacaacaaataccattatacacatgaatgacatgaatttgatgcaacataatgtagcagttacaatgcagcgacagaaggtgagttctaagtagtcaaccgagaagtgagattccagataatacgtagcctctgccataaattacaaaggattttacacgcaaaaggaaaatgcccagccgggtgaactaactcaatcctcattggttacaacagcacaccaactttggataaatggaagacataataactcaatggaaccacaatgcagctagtccaaaggtcagcatgatgaaagcaagcaagctgctctgagcttgctggccagcacttgaaacgacactatctttttgggaaacgccttcgcaagaaagacctagcttgccttctcggcactcgtttgcaaacagaccaggtggatacttgccatagaggttgatgtagctgaacattgttgatgcacagtcattgctctcgtcgttgatatattcattaaatgggcatgcgaattccttgaaagcatcgcagcactgtttagcaggaaaccgtggccctttgcacttgcttgtgattattgtgtagttttggaactcaaaattcacagggcaatctgacaagaatatgtaaaaaagtacatcagtatattagaacgatgtacttgaaagtcttgtagcatgcagagaaggtaaggagtactcctatattacagacaacttacactatgatcagagatgaccagtgatctatcttaacgttatttggtgcattgcatcagcaatatatgtgtattgttcattagaccaaggatacagaaaatatgtaattagaggttgccttgaataatttagttcttgtgcagatgtttgcagggacaatttatctaattggcattttgtccctttgcagaaattttctatattcatattaacttatctgttacaggcccacttattaataagtacatgtcgtgttatctggatattgcacatcaaactagagaacgcattcctgcttcaccattcaaggatcaacagaattagctcagagaactcatttcatctccgcccatctaaaatcaagagaacagcagtttgcctgttcatcgccataccctataagcatgacattttcagtttttctcactatcatatacttagtacctgcacttttggcgtgcaatagattctgagcacctcacaccacccatcataaaacagttcataatcttggaaaagctgtggtgatcaaataaccacaaaggttcagctcctgacactttggcacaccagttgcagcaaagcgtggtttgtaatttccattggtatgttatacttaaccctgttgtcaaagtcccacctcacaatggtataaatgtagcaacaagcatctctctgtaaacaaaattagcaacatcatgttcacataaacactaccctgaaacttcgctccagatcatccatccgactcatcggagtagcttatccataaaaagtgtcccagttctcttcctcaagacaacatggatgagtcaatcaaatacttttcagcaatcctcgaagctaccatgatccaatgacacgatttctaactactcgcagggtggcaagcatgtctttgatttcgatggacagatcggggaatctactccatgaatctacgcggcagcatccaaaggtcacttccactttgtcacatgttccccccaaatcaccaatttcagatcaaatcccccctaccttaacccaacctcgaatccaccacgagcaattgaagttacaaaaggatggaactgaacaagaaatggagggaaacgtactcttcttggcctgcagcaagctcctccccgtagatccgacgctccccaggaacacgctgtctgcagaaacaaaagaggcgaaacgaaaccaaacccgtcagaacctcacgaaccgaagcaaagcggagttcgaggcaagcggcggaaaacgagcgcaccggaaatgaagggggacgcggaggcgagcccgacgaggacggcggccgagacgacgagcaggaggagcccacggtccacagccatcgtgctgcacctcctcctcctcctcccaggcgcagcaagaactccttgtgctcgctcgctcgctcgccgccgcaagaaacggcgggaccggagctcgacggatctaagcagcacggcggcgatgggggaggggacgcgcgggctgcccacgtgcgcgcctcaacgtcttcgctggtgtctcgtcgatcctgagctctctctctctctctctctctctctctctctatttctctctctaccttaagaagaagcagaggttagtgaggcaattaattatgcgcggggacggagctggagtctggagctggaagaagcaaagagagacgagcacgacgcgctttggtttggttgccgttttttcttttctttttttttctttattattttggttgctatatttgtgaccgtgtcgcgacggtgcgattctgtgagctggtttggtttggacgtgagggaagtggagcggtggatggagggggacttcacgctcgtcgtgcgttttcacttggttttctctctctctccctctcttttttttcattcggggcttagaagttgctgtgatcagttactcttaggaatacactacatgcgagtttaagacgtcatgttttttgaaaaaaaaaatctataggagagttaaagtaatattattaatctagtttttaagtttgaaataatggctcaactatctctttttttttcttttcttcacttctcaaacatagtcagaaaaacgaggagagtatacaaaatagattgaaattaacaggcaaacaatgaatcttcagggggcgttgatgaggcccagcgggaagcgggtagaaattacacaaaacaagtccaacaatgtgataattttaacgtttgttccttccgattgttactgtatgacgctgtgagtagtaaattgcagcgccacttgttctttctgattgaattattatgttactataatcgtaaaaggacttatacatcactttctccttttgtaaattgtatctcattctcacgtgaaatggtcaatatctatgtgtgttcccatgacaagcgcacgcagctgtagagacgttaaaatgggtcagccctaacaaatctttcctcgcaggcatgtgcgttgcccgcgtccatccttgtccatgagatggacgtgaccttctctcttgacgaaaatgccatattccatctggcatttgtgacaggagtacatactactcctatcacaaacttttctgcgagaacgagtttgctgtttgccagctaagttggttacatcatgtagtgccacacagctcactgcgcggcggaagaatacccactccccaacatgcgatccacaatcagcggatgtcaatgaaaggacgtggcaacaccaacctggaaaaacacctccttttgcctcgttcagattttgctttgcatacgacaaataaaagaacggtaaattttggcatttattggccgtttcaccatgtcaatctggtataagtatcttgcagcagcaagcagtgcagtcatatatttacactttacatttgaagggaggcaaagcaatgaaaaacctgatcatgtattgaccatatcaaccaaaaaaagggtatgaagaactatgaattccggcccattgcctcaaactgttctgaaaatgaaaaatgcacaaggcattgatgagatgcatacagcagatcaggaggctcgatggaacataaataagctgtgcattggctcttttagaatatcccttttggactattataagctggactatgttaagtgacttccagcacggtctttcttgactatcttctcagtttgcctcgggtcaccactctgtacttattcagagtaagatttgctcggttttttgatagaccaaaaaaaaagtgagaaaagggtaaccatgtacaaagcaatgaagtttagttttatgttggaatgccggcattagtaagtcgtcgactcttcttttcttgttcctgtacattgctgctaagtttattatgtacaaaattttcttctctgcaacagacaagaaaaataaaataaaggaatttagcgtctgacaagaacaccaagaaataaaagctgcagaataaatacaaatatagtctgtgctacatagatacacgcagtagtatttgaacctagaggccaatcaaatcatacaatatgaagaacaaatgcattcaacgtgggaaatattgtaattatttcataactaaaattcactgtgggaattcgcttggatatattttttaaaaaaatcatgagctgcaattaggagtatgtatttcatctcaagttagcatgagagtttttttaaagagattccttatacaactcattttgtattttcaaaagcaaaacgagcttaaaatccaactcaaacacggatctatatttccaaaagcaaacaaacataaaaaccgattcaaacacggatgacgtactaaaataccaacaaaaacatcttcaatttttataatagtagagatagagatatgatatgctcaccctaagatcggactcctttacagcttccaatgtctcagccatctgcatttgtctaatcactgttgcatgcaatacctgaacaaacaaattcaaaaacatcacatataaatagacgaacaatgaaatacaacaacaaaggaagctaatattatcagctaaactgcaaaaaggtaatgaacacatatccaatgaattataacttcagtatgcactacacccaagcaaacaactatatattaacatgcccactctagtagactcctaggatctgacccatagaaggatttacgtatggcaggttagtataattgcaagcctgcatattaagactgctatgaacataaccaatgatagcgatgtaagatttgaaaatgttataaagcacatttttaataagtacaaaaaacgaatggcccttgggagatctcttgttaaaattttggatttaaataggctgcattgcattttccttctatctccaatgtttaacttgtaaaggttggacgagcatagcccatgcagttcctattggatagtgtgatcaaaagtctcaggagtggattggaagtatcttaaatctgcatattcaaataaataaagccacaatttcatagttgacttcaactatgttggttcaaaattctcttaactatttaacagaaattcatctatcaattacagaacacccttctgtggtaagcacatgacagagagctaaccttaaacctacaaaaaaaaaagtcagcaccataattcaattacagaacacccttctgtggtaaaacaccattaccttctttgtcttctccagatcaaattcaatgcactttatcctgtcaaaagaatcctgtatagcacgatccttatcctgtggaatctctggaggctttctgctgagctgattaaacattgtctcaagtctttcaagacgctctagacaaggatttacacgatcttccttaattatctgaagatctgcctgattactgtgcactgttgtagtatgctgggggacattttccaactgttgtcgatgacggatgaaaatacgcaaaaaagagagtacttcaagaattacaccgagaacttttttagaaatatatttcaagatcccatgatctgcatttccttcaccatcatttgggacgtgacctgctagtttcaattcatagtttcaagaatcagaggggctgatctccttacttagacaagtgaatcaaaatattaatgaattaattgttttttagaaaataactcgtgcatgcagattttgactggatacctggctcaggcgaaactctgtttattgagggattttgtcttgcgctgtactgtcccgatccatttccaggagggttgtatcttgtattcgtctcaacaactttatcatcagaaccactgcatgttgatcctgactccctggcctgcatgataaaaccaggagattaagtctgttatggaacaccattggtgatgcatgctatatgcaggcacatggtaactgcaaagaacatctaagctacttttcatgacaaccgaagtagtaaatgcgtagtttaagatggagcagacagatgttcttaaatagtggtagcacaaaaggaccaagaacagacctcctcatgaactggagccaaactatgatactcaaaatcttcctgtcctataggagatccaagatcatcaacatctgaaccagattcagcatttgatgtataactaattctttctggtaactgaaagaagtagcatcaaataaaatgtcaaaatagaagatgggacaactgagcatatgagagttcatagattgaacaattggtaatcttgccttgagagcacgcaatcttacagagcctgtaattgcttcttctatatcagatacttggccaatgtccttcaacgcagatgattccatgcaatgtacaagctacaattggaattaaattaatgaacagtggcagcagagttacaaatttaactcctgctgcactgtgcagactatgatatgctaagagaaaaatggcaaatttagagatttaccttcataattaaaggatcactccaggggcctttgttggatcgcaggcatcctccctggctagagcacgtgcaagaaccaccaagaaactctggtagttggctgcatatatatgttggtaagccaggcaccacagaacaccaacaaatcttacatttgaaatcaaaataacatataagatcacaatcaccaaccttgagtcaatagcttcaagaagtctgtgttggtattttgttcctagaacctgtaacaaatagtaggtatgagcacacacaaagatcacaaggtgaaaagtgaactttcaaagcttgcaaaagtttgtacatggattttagacgaggttttggggtcaagaagtcccttcacagtactccagatcagtttaaaaccaggccccgcatttacaatgaacatttgatgtagtgtctgcatgatttagggcaagcttggtagtcagcatgattacaaaataggcctaaatttcataagtaacacctacctcaggataataatcaccatctattttctgcatacagcgcaccaaatcccttgcgatcttgctaaagttcttccaaccctaatacacataaaacagaaggaacaagctaaaatgctatgaaccattttccactattatgcaaccaggatagagatctacattacttgtaaagaaaggtactgcttgaagaaaatagtctattatcaaaaggaaaactatcctgggtcatatgtgcatatgtttaaggaaactaattgtctgaacgtatacagatctactcatggcattcttatcttgcattgagtggatttatcccaaacccttccgaaattccacccaagtgttagaataaaatccactatacatttggtttgcatggatcagataagattcccaatcattaatttggaattggcaaaacaaaatattttggtgttctttctcaaaacaaaatattttggtgttctttctcagttgctccaaacatcatacaaatttgactaggacaatgctttccttttaaaacatgattctcaactcaatatcatgaaggatatttatttttacatgttcttggtgtttaataaacaatgatgaaagctaatttccaaattgatggtttcataacttcatgtctttaatgtatcaacaccttaagaaattgttagttcaggcaaatgtctttattgtgagcatgaaagtatcttaatgtaggactgatattctttgtcaattttattagacaactgctagcaagaagaagacatagttaggtggcgatggacaattgaacataccacaccgtggacatccagtattgtagttgtcgtatcaatatgctttttagcagcaattgagcatgcaggaaacttctctcggaatgctctctcaaattcctgtacatgatatttaatatagcgttccactgttgtaatttgtacaagcttactgggttcaactttcccaagcaactcgatatagacgggccttccttccttgtcaacaccatgataaccatggggataatactgcagcacctcctctagctcatgaaattcaaaatcctttaacagagaagagttagatgcaatcagtatacatgttgtagtaaagaaattatgtgggaagcaattgttcatatccatagagtcctagtaaaaatgcatcaaagtgtagtacagttttcagatcaactcaaagaatagacagtgtctttacttccaaaattgtgtcagtcccgaaatccttcctccagtgcagcatgtcagcccacatatgtgctgccttttcaacatcaaatttcctagctttcaagaatctgcaggatatatagatcagaatgaacaatcagtaagtgggcattcgacaaccgaaaatacttatattagaatgtttcaactgatgctaacctaagcatcgtgtgataatcgtcatgcctctcaggcagcatgtccctggcaaacaaaacctctcgaaaagagctgacagcctgctcctcctccgcgtccctgacatcctctatcgtgatcttcggcactctgcagcccactttcctcttccctctcttcttcagcgaatgcgtcagcctcgtagatgcatgcagcgccttcttcttcaacgaccgtatcctcgtctgccttggctcatcctccgaaatctcagcgtcccctctgtccctcctctcatcgttactagctgatatttcgatgccgtcgacattgctctctgcaacaacgcaacgcaatccagagagcatgagctgcattggccattatccactaaacctacataccagcacgataatctacaacttcatacctgacattctccacaaatgcaccctcagacgatcagacttctcactctgtatttttctcaaagatcgctgatccgatacttagtcacaaccacacgggcctagacgctgccagagacttaatacagattaaaattcaattcagagagttgtactagaacaataacgaactcgccgcacattcattcaacgataagccatggaaacagctaaaacccgatccccccagaaagcccccaaaaaaaaagtgatccgttcaatctgcaataaatgctcccgccgcgagatccagcgggagccgcacccaacccccccaaccgcctcgggaatcacgcgaccgcaagcagctagctagatccaaccgcccccgatccgcgggcgaactgcgcccttatccgaatcgatccgtacctcgtcgccgggagaggaggagatctgcagctagcggcacgcacgcatccaccagctgcggcggcgcgggactcctccgatcaggctcggatcggagaggcgggccaacgggggatacccccggcggcgagggaggattcgaggcggcgagggcgagggcgagggcaacgcggaggaaattcgagttcggtgcgagcgtttgttttgtttcgtttgtttgatccgctctctcctcgcgcttacgcttccatggccttccttttccgcctactcctatactactagtagtgctgtgcttctagtgctctctgtaacgggggtttcctttttcgaggggcttttgatgtggggcccacgcgtcagtgggggtgaacgcgcgcgcgtcgagattgacctggcgcgcgcgctccgcccggcgcccgcgttgcgtgactgcgttacgaagccccgggaggggagcgccgacgctcacgtgcgcggtatccgggacacgtggggcccgctgtgaagtggggtcctgcagagccaccggcaggaggtaggaggtggctcctgagtccctgagtctcctggcttcacacaaaagtatttatacaaatcagccaagtatactccctctaaaaaaaataaacataataggatgtgatttatcattgtataataaatctgaataaaatattcagactagttaatatgataaatcatattctattctagatttagttcttttttgacatggtgagtatgacataggtgatttttctcgaaaacactagtgaattgacatagatattaggcaatgttatttatcacctcttcctaacttctgctctctcttttttcgtgcgcacactcctactaaaaaaaatatatttttatattgaaagttgttttaaaaaaattgtactaatcattttgttattgtagctattgtttaattaatcatgcgctaatggatcgctcctttttgtttgggaggtgaaccgaactcacctcgaccataaaactttgctcttagatagtgatgcttagagcatatacaatagttcccaatatccctacatcccaaacaaattatcacttttggagatttgcgtgctccaacagtcccctagtaccttcctctatccccaataattattggtaatcaccaacaccccctttcccctcacagacaaacagagcctttgtttggatcatgggttaagaggagtgggattgaggtaaggatatgagtgaagacttaagatgaaacggaatatgaaaaattaacggctaggtctaaaggttatccttcaataagatgaaataagaattctttgtcccattatccaaacatagtcaaaagggaagttccaactcccctatactcgcagtttgtttttgtggcgccacccctatcgcctcgattgggctctgttcgttcaccatcgtgctccctctcaccccactcccatgccccaccaaccaatatgctcgaggccgccactccctcacgacggcgctacgtcgacactgctggagttgtgaccgtccgcggcttcccgctgcatcgagctcgtgctttgcgagtgagatcttgtagcaggttgcgatgatgattttcaaacatacattcgttatataaattggaggattttatagagaacggattatatggtagtgccgtggagtaggatgcgttatctccttgttggtattgattgagggttcctttgtcgcgttagatagtacgcacaacaccgtttcaaaaatataagacatccttatttttggagtaaagggtatttataagttgactaatgattaaataaactaaaaatatctgtttagtattatgcatgtgattcagattcatagttaattaattcccttaatttagtcattaatattataatataaaataaaataataatcaaagccgtaataaaaaatatacactatatcttggaatttggaatgaaggaagaattacaatgtctttgtaaacttataccttagattttaatgatacatgatatttgcatgagaagatactacacatggtgtgaaatgtggatttgcttagcactttagctaaaagacgtgcctttttaaccttgcacagtttgtaacatagaccaattatacaaagagtatagtaattgggacggtatagccacaccgaagtgccattagaatttagaagtttagaacgtactgcctctgtttaaaaataaaacaattcaattactgaatgtaacacactcgtattatttgaatgtgtcacatacacatacacagtactgattgctttattttagaaaggagagagtagggtgtaaaaccaaggaacagcctcgccatcttaaatagctaaatattgcacattactttctcgccgaaacacagagaaagcagaatcagtcaacatcatattccatagacaaatttcacgcacaagtaaatgtctgatatgatgatatatacaacactttgctcctcgtcctcgtatagcactggaatatcactgaaaaagaaagattttatttgatatgagtcgtggtagagtatccagcggaccaaacagttcaggccgagaaaacttacatgatggcgcatctctttgttctgcatttgaatcttcaggacatctccagtaatttcattctgcaactgaagttgaagatggtaaacatcacacactttatacggctgaagtttgctaaccccacttcacaaaatgtatattaaccaaaccatatatttacaaaatgttaatatcttacaactatgatagcagcaagtacatagtagatgttactagtttacgtctgatctagcacgattgctatgtggttttgattcacatgtttgtaaggatttgtttccaccttgtatacacattctgagaatcatgcatagtgctagcttttttttttctccaatttcattaacgaaacgccagttgttttgagcatagtgctagctatacatgactctccgttgatagtttatctagtttgatacttcaaagaacagtttatcccgtcccctatgttattattaatattaatctgctcccatacatagtatacgagagttgagtatacccatgattataacttacaagagtgttgtcatcaaaagcacataatttttttaacaatggacagaatgaaaatcaagatccttaaccagtcacataaaaaaagattgatgcatttgttaacctaccaatacacgacgaatatacacacattgaaatgctcacttaaccaaggtaattagtccatgagaacacactaaaaggatgacctaccagaaactaatgttaacacataaagatgcgtaatatagaacacactaagatgcttgttaaactagataaagcgtacagccacacaaaaacaacattgctagtttattggtgatgttggcatggaagaacattaattcagaatgaagtggcaacatttttcatgccaaagttctcaacttgaaaccctattggtcattttcaggcacagagtcaatcataggtgttctaccaacaacaattgccacagcattatcaaagcttaggaaataattgtacctggcaggccataattagagcttgggctttagtgttaccactgaagtagtcacggacaggcttaaagaacaaaaaattacagtaagaacaaattaagagcagagaataacgagtagttaaattaaggggaagaacataatggcaagataaaatatctacaagcatccctcagatttggttgaactcctgcatatccaatatcctgtagtagttcacatactgattggaaccagaccatcatcccgcaatcccactgctcattgtgtaactttatttactaaaattatgttaaagaaaatcttgtttgtcgctaggtatcttatcgaaatgtggacttggaccagccttacacccataataatgcaaaaagtcccccttaaaaacactcaactttcatttgtatacaaataattccatgtacagctttattaaaaggtgtttttaacctaaatagcctagtgatcctagtagaagctatcaacacatgactagccatttggaccgtagctcttaagagagcaatatatataagttacctctagaatgttgtttattgctttctcaagagccatcttaacatcagcagaattgagataacctctttcataatcaacactaagttcttccatgcttacaaatgtcctgtagaaaagtaaaaatctcatatcatggggtttggagtatgatatcaatctatagcacttacatttacagcatagcaaatttgtttatttcgtgaattagtatttactaagctgcatcgactgattattgaatatagattgtcatgatatagaatggatcagtgtacattctataggtgaataacaaaattgacctttgtaacttttagtagataagcgaaagatcaaagaaccttacttggtactaccattccattcattctggactacctccaagttcccaaaccaaggtaggatgatatatttgatatactccagacatgggttgtgtaccactacttttggaggacagaatgccctctgtatttttgaatttaaagtgtgctgcaatgaacgaaatggcattttcagataaccatattcattaaaaaaaacagtgaacaagagagctaaatattgcccatagatcataatacaaacctgattgtcccctaataatacagcgcactgtatatctcatggagaattacaagaatggcgcaagtgttcaaaattaactacttgatcagcatttagaaggacttgagtagtgaagcaaaaatacaacaatttgagataaatctcttgtacagaaaaaaaagtttcaggtgtaaaaggggttttaccacataggctgagagagattcaactatgaaaactatagggctaagtggataacatattcttaatatggcatcaggaggcaataaagttattttattgtctgcatcattttaatctatttaacttgtacaggcaatacagttgatcccccaagtgtagttattagtatttccatatctttccttgggcaagccatactgtccctattactcaacctttagatgaataagtagtgcagacggatgtttaattcatttagctaacccagccagctcaaaacctaataaaatcctacattttccacgagacacagcctcaagcttctaaccaagaataccatccgatcattaaaatgccacaatttatttacatcaatgatgctatacggaatgtcaaatcaagaaaacacactagtatcatcagaaaagatggtccatctccgtatctcacttattgatgcttttgcttaaggaaaacaacaatttttttcttgcaaaacaacatacattcgcgtaaatattacatgcaacaaatttcatgatgtagctatcacgtaatttgttcatattgtcatttttcttaattactattgcaatacacctactcctatatattgctatcagttaccatttttccacagcaattgtgagtgtatgccctccaaaactcttgaattcaaccagattgtgcatatatttagcttaaaaatatgcaaaagggagatcgatatattggccttagcaataaaggctagatagccattgcaaaattatcagtttatcacacaaaatacctcctcatcatgcatgaagatagttcgtccacgatctcgcaagtccacatattcaggatcttctagtaaattaggtagagcatctgcaattgaactcttcaagttaaggatacatttcaaagaatgccaacatcaacgctaaaacagcaaaaaagtacaaacatatgcatccatcattagcaaactggggttaacagaaaaataggtctgataatcataccatgcagcaaaatagttggtttgttcacccagtttatgttttcacaataatctctagtgagcatgataatatctcgttgatccatgctgaatagccatatgttcgtctgcagttcaacaatggaaggctgtgagtattttcgtgcagggccaagataatctataagtaatatatatatatatatatagaaaactgttcattacaatagttgacctaaactagaactggaaggctattacttgagagctaacattgtgatatctgatagcaattctacaggaagggcacttcatatcaaagatcttcttagagtaagaatataaaaaaaatgctaggaagctgttaccgaccaaatttggcaatatcagcatcggaaaaggagattagatcaaggtggagtcaaaggtggagattgatccgagaacagagcaagaatcggctgaagtccagatcggctacgattaagatcggctgggtctgagtcggactaggtgagccgatgcagccgattctgacagtataatttggtgtatgacattgggttgaattgaggtgcttcaagatgattgccgcacatggatagagtcccgagaagacaattgtatctattaattaggatgttttatgtaacttccttagagatatgtttgggcaaaagtctgccgcaaagaggtatcttagagtttgttagagataatggtcgtgtccggtatgaacatatcttgtaattctcgggtataaatagaccccgagccctatgtaatttttaacacacacgttcaatacaatttcggcgcatcgccacctttttgctttagttttgtttcgacgagttcttgctttcgggttgagctgcatcggtttcgatcttcaacaagaggtaaaacttgttatgacgacttgtgttctcgagattagcgtttccatccttatgacactctaatcttgtctatataattcgtcaagttatcatatatcttacataatccttggcaatatcgtcatctaatctacaatcggctaacatctgttaatagaaggcagccgattagattaaatagcgacgttgtccaagatcatataagatatctaccactttatgaaacacccagcggcttgattgtctagatattgttcttcttttcatacttaatgctgcatcagttgagtttgatctattaagtcgtgcttagaatatcaatctctagcctatcctctggttgccgattagggtagtatcggagtttcagccgatcttatctgatttaaccatattcgatctatatgcttcaatgacatgttaaatccgccctttatgtcaggatcttattgcatttaagtatattaagcttttgtttggtatattatatttgttttgatatctttatataaagtagtatcggagtattagccgatacatgctagatctatctgatcggctatgctataaacatatataatcctgttattaatatatatttcgatctaagtgatttatactgtctcggcatggtgaccgatctatcccaatcacttgatttaagtatatattaatataagagctatatatcgttaatatctacagccgatcgaatagatttagttccttaccgccgatcgattcatatatgacattggctcaaagataaatgatatgtcatcggcacctagccgatcggctatcatttatagatttaaccatgaattctttgtctctatttcttgttgattacaggatcaaatcaattggcacgctcatacattcgaagacgagctttggaccttcactggagttaagcagatctcccaggcctcgtgttttctgttaacacgcttttggcacgcccagtgggaccgattagaagtcagcaagcaattcttcctgatggccgagaagccaccactgtcgccatcctcggctagcccaagcactgttaaagaaaagatccagaagttggggttgactgacgtcaatgaaggaaacgttgtgcccatcgatccagagaaattcacacctgagcagaagaaggattttgaagcaatgttgcagcaagctcgggatcagttcttgaactcattcatgcagacccgcaagggaacattggttcagaagtataaagtaaaggtagttgccgatgatcctgggaccagttcttccaaaagtgaagacgggaaacaagctccagatggctcggtgttgacgaaaaaatcaaacacaccggcctgggagatctgcttagctccagtgcaggtccaaatatgatgagatgtgggcgtgccagtcagtttgatcctgcaactgacaagatatgcaaatagtagatcaaaacagccaatcggctgacaagccgatggagtagttccagccgatagccgataatagccgataccgataccagccgatagcgatagggtttaagcaatcggctatatgtccaatgtagatattgatataaaggcaatcggctgatgatgatgtaataaaataacaatataatccaatataaaccaatcggctagcaatgatatgataaataagcatcgatccgaaggttaaagcacccaacggctggaggtccgatgtcatgaaatccacaagattagattaaacaatgaaacctttgttgccatcggctaaatccaacttatatgtatatgcaatccttatgagccgatgcaacgtccagataactcaccggctgaaaccccgatgaaacccttattggcaatcaataagcagactagagattatggttctaagcacgacatagtagatcaaacttaaatgatgcagcactaagtatgaaaagaaacacaatatctagacaatcaagccgttgactgattttcagggtggtagatgcctaggctaatctaatctagcaacgcgatttagccgataccggcagaaaccctaaagcaagagacagccgatagagctaaattgatatgctaagactagattaacagagacatgataaataggtaggcaaatatatcatccaaaccagagcaatccaaaaggtcgaatgtactgatgcagccttgaacgacgccgatgtaaacgatacaattgcctgggccgacggaacattggacttaccccttcgctggagatcgaacaccgatgcagccccgcgtcaggtgccaagtcccgccggacgataaaataaagtagaaaaggtaaaaggtggcgatgcgccgaattgtattgatcgtgaggatagattacatagacctcgggtgtacatatttatacccatgggttgatacaagtccttgtcggacaagaaagaaactaacctaaagataaaaggaaaatataaagtccttatcggacactaaacacactttcctaaagataaaaggaaactaacaaactattcctgattaatagataacttgccatgccgcattctctttgaactcggtctcttctggataagcttcctttagtacatcaatttccttaaccgaatatagcaagaatccgacaactgacgacttgacaattctcatcggctaatctcaggactttgaagccgatgccgactctcagccgatgactactccgggcttaccaaaattcactgttaacactcggctcaactgagtgataaaggtgctaccaacggttctctaggaagtcaaggtgacaactctcaaggggtccgtggagttcgaggtgatagagtgcatggagttcaaggtgatggtgctcaggggttgcaagggggaaatcttaatcagaatagtgatgcggcacaagattttttcaataatttccaagaccgagtcgactatgttgtgcaccatgctttgatcaatcagtctggggtgttagtcaataccttatcaaacatgatgaagtcaatagccgatggatcaatagctgagcatcaggctgcaggcccagtttatttgcaaggaggtgtctttccaaattatcggcctttgatcactgatgcctagccatctattcaggcagttccccccgtcgcaccatcagctcagccgacggcgccggcatcaactcccttacctgctccgtcagcattggcaccaggccagctggtgaaccctcagttgttaatgagagagcagccacagcatagtgggaaggttgtgaatcggtcgacgcaagatcaggttgctgccatgtttctgccacctcaacctgctgttgatccaatacagcagcagccgattcaacagacactcccgattcagcaggttgtacaaccaatctagcaacaagttgtgcaaccagtccagcaaacgccaccaaggcaacagcctccgcggccgattcagcaaacaccgttaagacagcaaatcgttcagccgattcagcaccaaggctcaatgagcgcatcggccgggtttgtgacgcttggtggacagcctgtacaacaatttttaaatcaagtcgtcccagaacacttggttcaccacgtacagccggatggcacagtaatgcctcaagtggttcccgagcatttggcacgtaatattcagccaaaccttcataattaccaggggggcaacttgaattatcaatatcagcctccttccccgcaagaccaatatcaaccagggggactggctcaacctcagtttgcgtctcagtacggtcagttcgagcccatgcaacaacagtcacagggagcagctcagcaacgaccgtgggccgacgtgattgctgatgtaatgaggaaacagtttgggcttaaaccaaaagagactggaagcttgtatcggcagccttaccctgagtggtttgagagagttcctctccccaatcggttcaaagttccgaacttctccaaattttcgggacaagatggtgtgtcaacctatgagcacattagccgatttttagctcagtgcggtgaagcatcggctgtggacgctctgagggttaggttgttccggttatctttgtctggatcggcttttacttggttttcttctttgccgtatgggtcgatcaatagttgggccgatttggagaagcaattccacagctatttctacagtggggttcatgagatgaagttatctgacttgacggcgattaagcagcggcatgatgaacctgtgcacgagaatattcagagattcagggagatgaggaacaagtgcttcagcttgagtttaactgacgctcagttagccgatctggcctttcagggtatgattgctccgattagggagaaattctcgtctgaagactttgatagcttgtcacatctgatacaaaaggtaaccttgcacgagcataggtctgcggaggctaggaaaagctctaagaaggttaatcatgtttgtccttacatgtatgggtcggatgacgatgaggatgactttgagatagctgcagccgaatgggtgaggagtaaaaaggtcataccgtgccaatgggtaaagagttctggaaaggaagagaagtatgattttaatattactaaagctgacaagatttttgatctgctactccgagagaagcaaattcaactccctgctggtcatacgattccatcggctgaggaattaggcaaaaagagatattgcaaatggcataattctgggtcccattctactaacgattgcaaggtgtttagacaacagattcaggtggccattgaaggaggcaagattaagtttgatgattccaaaaagccgatgagggtcgatggtaacccatttcccgttaacatggtacacacagctggccgaacagctgatacggggcgcatgaggggttatctagtaagttcggctagaattataaacaaatatcaaaggaaatacgacaagaaacaggaaaggcaccatgaagaagataatggtggctttgatcctcattgggttgttatttcttcgggttctgttggaatgaaggtatgaggttaccatctatcgaggattgtcctggatgcagtgatgttgcagggggttcaagccgattgtacgatggaggcaattggctaaaacagacaagagtgcctattcatcagagattgggcccggtaaaccaacgtggtgactcggaaggtgacgaaaataagaagactcaatggtgtcctcctgatatttttacgaagaatcagaaaagaagggttcaaagattgaggagtagggaacgcttccaggaggtcgagcaagaaattaatcatcggctgaagaaagcaaaaccgaggcaggagtggcgtgttaaaaatcaggctcctgtagccgacgatgttgcagctgatgaggcaaagtggttggcaaaaggaaagagtgttgtgacaacaccagttaacatggtttttaccttgccagccgaattcggcatcgatcaagccgatgtcgacgaggtggaagaggaattagctaagttggttctatcaccagaacaggcggtgttcaaaaagcctgaggggacagagaatcggcatcttaaaccattgtatataaatggctatgtcaatgggtagccgatgtctaaaatgatggttgatggtggggccgcggtgaatttgatgccttatgccacgttcaggaagttgggtagaaatgccgatgatctcatcaagacaaatatggtgctcaaggactttggtggcaatccatcggaaaccaaaggtgttctaaatgtggagctgacagtcggcagtaagactattcctaccacgttttttgtcatcgatggtaagggttcttacagcttgttgcttggaagggattggattcatgccaattgttgtattccttcaactatgcatcaatgcttgattcagtggcaaggcgacaaaatagatatcgtaccagccgacaggtcagttaatgttgccagtgctgatttagctctttgggagatggatggccttgattgtttatctggaaaagtttggaatggagattttctaaaagtgtccgattctgatatacagccagttgaagatggagaacccaagctattattttgagggcgtcgtggagagttcaagtgtttacactaaggatacggtagatgatctcgatagcaagcaaggttagggttttatatcggccgatgatttggaagaaatagatataggtccaggcgatcggccaaggccgacatttattagtaagaatttgtctccagaatttagaaccaagctgatagagctcttaaaagagtttagagattgcttcgcttgggagtattatgagatgcctggactcaaccgatcaattgtagaacatcggctacctatcaagccaggggttaggccgcaccagcagcctccgaggagatgcaaagctgatatgcttgaacctgtcaaagctgagattaagcgtttatatgatgctggttttattcgtccttgccgatatgttgagtgggtttctagcatagttcatgtcatcaagaagaacggcaaggtgagggtatgcattgattttagagatctgaataaagctacaccgaaagatgaatatccaatgccagtagccgatcagctggttgatgctgcgtcagggaacaaaattttgagttttatggatggaaacgcagggtataatcaaatttttatggctgaagaagatatccatgagacagcttttagatgtcttagtgcaatcggtttatttgaatgggttgttatgactttcggcttgaagagtgctggagctacatttcaacgggacatgaattatatttatcatgatctaatcagctggctggttgaggtctatattgatgatgtggttgttaaatctaaggaaataaaagaccacatagtcgatttaagaaaagttttcgagaggaccaggaaatatggcttgaagatgaatccgacaaagtgtgcctttggtgtatcggctggccagttcttgggatttcttgtccatgagaggggaattgagataactcagagaagtatcaatgcgatcaaaaagattaagcccctggaaaacaagaccgaattgcaggagatgatcggcaagattaattttgtacgaaggtttatttctaatttgtccggaaaattagaaccttttacaccattgttgagattgaaggccgatcagcagtttacttggggggcagagcagcaaaaggctttggataatattaaaggatacctgagttcccctcctgttttgattcctccacagaaagggataccttttagattgtatctgtcggccggtgagaagtcaatcggctcagtcttgattcaggagttggatgaaaaagaacgagttgtattttatctcagtcgtcggctcttggatgcagagactcgatattctcctgtggagaagttatgcttatgtttatatttttcatgcacgaggttaaggcattatttactgtccaatgaatgtactattatatgcaaggccgacgttgttagatacatgttaacggctccaatattgaaaggaagggttggaaagtggatattttccttaactgagtttgatcttcggtatgagtcaccgaaggcgattaagggacaagctatagccgattttattgtggaacatcatgatgattcaatcggctcggttgaaatggtgccatggactttattctttgatggatcggtgtgtactcatggttgtggtatcgacctagttataatttcccctaggggggcatgtttcgagtttgcttatactattaaaccttatgcgactaataatcaagctgagtatgaagcagtgcttaaagggttgcgattgctcaaggaagttaaagccgatgctattgaaatcatgggagattttttgctggtaatcagtcaattggcaggggagtatgaatgtaagaatacgttaatagtttataatgagaagtgtcaagaactgatgaaggaatttcggctggttactttaaagcatgtatctcgagaacaaaatattgaagctaatgatttggcccaaggggcatcggggtataagccgatgatcaaagatgttaaggttgaaattgcagcaataacagccgatgattggaggtatgatgtgcatcaatatttacataatccatctcaatcggcttctaggaaattaagatataaggcgttgaagtacactctattggatgatgagctttattatcggacgattgatggagtgttacttaagtgtttgagtgccgatcaggctaaagttgcaatcggcgaagttcatgaaggaatttgtggcactcaccaatcggcccataagatgaagtggttacttcggcatgcagggtatttttggtcgacaatgctggaggattgcttcagatattataaggggtgtcaagattgtcagaagtttggggcaattcaacgagcgccggcgtcggctatgaatcctttatgaatccttcaacgagcgccggcgttggctatgaatccttcaacgagcgccggcgccggcgtcggccatttagaggttggggaattgatatgatcggtatgataaacccaccatcaagtaaagggcataagtttatattggtggcgactgattatttcaccaagtgggtggaggccattcctttgaagaaagttgattctggggatgcaattcaatttgttcaagaacatataatctaccaatttggtattccgcaaactattacaactgatcaaggttcaatcttcgtgtccgatgagtttgttcagtttgccgatagcgtgggtatcaaattgttgaattcttcaccatattatgcacaagctaatgggcaggccaaggcatctaacaagagcttgatcaaattaattaagcggaagatttctgattatcctcggcaatggcatacccggttggccgaagcattgtggtcttatcggatggcttgtcatggatcaattcaagttcctccttataagcttgtttatggacatgaggctgttttgccatgggaagttagaatcggctctagaaggatagaattgcaagacggtttgacagccgatgagtattataaccttatggccgatgagagggaggacttggttcaatcgcgtttacaagcccttgctaaggttaacaaagataaggaacgagttgctaggcattataacaagaaagtagtgcctaaggattttttggaaggtgaacttgtatggaagttgattttgccgattggaactcgggataacaagttcggcaagtggtcaccgaattgggaatgaccgtttcaaatctataagcttgtgtctaaaggagcatatatgttgcaagggcttgatggtgaggtttatggacgagcgctcaatggcaaatacttgaagaagtattacccaagtgtttgggttgacgcatgatcggctagtgttgctgatgcatgacagccgatgtgttttacatcgtcttgagatggccgatattgttatatcacccttagttgtttttccaattgtaatcggttatggtttgccgatatataacggccgatattgttcgcccttagttgtttttctaattttatcaatgctgttgacattataaaattgggggggcacatatatacaaaaaatgaaagtgaaaattagaagttatgttaatcggcacaaaggattgttaaaacaatagggtattaaggtatcttaaccgattacaagaatttccaagtcctattacacaaaagttattgagacaagtactgctggatagccgaaatatctctttgcctaatttgttcgacttcttcaatggcttgagcatcctgagcatcagttccagaaatgatcttcagggacttggttaggtcagcaacattcttgatagccgatttgagccttgctttttgctcttcgacagattttgggagatcggctagctttttgtgctccatatccaattcagcattgcattcttcaagctgtgccaagagatcgatcttgcgggcttcaagccgatcgatattggatttgatcggaccttcggatagctgatcgaatttgactttttcttcatgcacaagctgccgattgacttggattgtggcttcaatctccttgcgctcacggcgttcggctaatcttagcttggctttttctagtttaaattgatgttgctcaagataagcggctggagttaggacatcggccagttcttcaggaattagagcttgaacttcgtgcaatcgtgtcctaatcgatccacagtcgaccactaagctatccagaggaggcctctagccgacgcgagatatcttcaagtgttttctttgcatcgtcagataagggagctagagctttacttgaaatatcttcttttgcctcatcaagataatctttgatatcaaaagaaaaaagatcggctagaacctgcaggtataagtttagaaagtttgagagctaagttaatatagtcgatctaaattcttgcatcaaaggaaaacttactgggatagcaggagcagccggttgttcttcttccacaatatgatgactccccacggccgatggagttcggtcactcgatgattgttgtacaggagaagaaggaggaggaggaggaggctgtaaaaagacaagtgttagacaaaatcggctgaaatcaactagtaaaattgagtgtcttactggtggagctggtttgagaattggtgctgccgatttcttctttatagcagttttcttcttctgcaactacaaaacctatgagtagttggctgaaaaataatgattataaaaaggtttgcaacgaaagatgttttactctgaagaagtgagtgggggcagaaggagttgaaggtatctgcttaggcgaagccgatggtgttttttcagtatcacttacttcggctgcagcctgatcaacatcatcctcaatatcttcttcatccagagcttgttcaatggatgaatccaaagcaggcaggtcgtcggttggcttggttttcttagacttggcctttttctttggagctagagtcaaggtgctcacagcctatgatctaattttccttttcttggttacatcggttggttccctgatggcgccttggaggagggtttagaccttgggggcatgatagccgatgacagggggagacaatccgcctccattaggaatcagacctggggcatattcaatgttcctaccactattgctctgatgtggaggggaggactctgttgtttgcaaaacaggaacaaaagattagtcaagtaatgaatcggctaaccgttatgaaatttagtgatgacaaagtttacctggggtatgacgtcagggaatagatctgtcatgcacattgtggccgattgatgaaatagatgcaacttccattcaccccaccatctgtcaaagttcctgctcctgaatcctgctaactcaatattgtcgatactgcctaagggaggtccttggaggttaagcagtcgatccttcattagagttgaataaatttctcctcggcattggatcttgtcagcaaagaataagccgattgggagttggcctaatccaagttgtctagctgaacttatagggtgatagaattcgtaggagacttggatatttcttccttggtgaataccgacaggtaggatgcatgggctgattgcagctgtaaagacttccatggacgtttgatatctttcatgattgatgtcttcaaatctgaagtctaatcagagctcaaggtctgctgagtcttcataaagaaaccaaagccggacatctttctggaagccttcataaaaactgcagaaccaatctttgagcagctcagccgatagttttgccccagcatcggttggtgtggatgcatattctccatatgacatgcatctgcgatgggtgcattcttctccatcgtcttctacaattggctccaaccttgggaattcagcttctgttatagatggccgattgacaactttcatgactaccaggtttagccaggtctgcagtagccaccacggtccacctgctccaactattgagccgatggctatcttagccgatacattgttcaacatttggtatagatagccgagaaggattttgcccaagggaaattgtttctttgatcctaaggcttcggctacaaattgccaattggttgtgggaccacagctggatccacagaagagaaacttttctagccacattagcaagaaagctacgtgctcccgaggagtgacaggccctttgcccatgtatgttgctacataaccagaccacccttctatgcttttggtcttgaagtcaaattggttcttggtgttcatactcatagggttagccgataaagttacatctaatccagtaatcatgatgatgtcgatcaaagttagagtcatcggcccttagttaaataagaaggcattgatggtgttggaccagaaataggtggcggcagccatcagaggttcatccttttagcagaattggctatggtgagagcaagcacttggccgatcccaatctcatcccactaggctttcttactagccgatatgcgttggtaccaggtggtccagctcttatcaagggtaggcttttcgagagatggccaagacttgaaagtattcttccagtgacccaagttaggatcggctacgattaagatcggctgggtctgagtcagactaggtgagccgatgcagccgattctgacagtataatttggtgtatgacattgggttgaattgaggtgcttcaagatgattgccgcacgtggatagagtcctgagaagacaattgtatctattaattacgatgttttatgtaacttccttagagaaatgtttgggcaaaagtctgccgcaaagaggtatcttagagtttgttagagatagtggtcgtgtccggtatggacatatcttgtaattctcgggtataaatagaccccgagccctatgtaatttttaacacacacgttcaatacaatttcggcgcatcaccacctttttgctttagttttgtttcgacgagttcttgctttcgggttgagctgcatcggtttcgatcttcaacaagaggtaaaacttgttatgacgacttgtgttctcgagattagcgcttccatctttatgacactctaatcttgtctatataattcgtcaagttatcatatatcttacataatccttggcaatatcgtaatctaatctacaatcggctaacatctgttaatagaaggcagccgattaggttaaatagcgacgttgtcctagatcatataagatatctaccactttatgaaacacccagcggcttgattgtctagatattgttctttttttcatacttaatgctgcatcagttgagtttgatctattaagtcgtgcttagaatatcaatctctagcctgtcctctggttgccgattagggtagtatcggagtttcagccgatcttatctgatttaaccatattcgatctatatgcttcaatgacatgttaaatccgccctttatgtcaggatcttattgcatttaagtatattaagcttttgtttggtatattatatttattttgatatctttatataaagtagtatcggagtattagccgatacatgctagatctatctgatcggctatgctataaacatatataatcctgttattaatatatatttcgatctaagtgatttatactgtctcggcatggtgaccgatctatcccaatcacttgatttaagtatatattaatataagaactatatatcgttaatatctacagccgatcgaatagatttagttccttactatctatttataaccgccgatcgattcatatatgacattggctcaaagataaatgatatgtcatcagcacctagccgatcggctatcatttatagatttaaccacgaattctttgtctctatttcttgttgattacaggatcaaatcaactggcacgctcatacattcgaaggcgagctttggacctgcactggagttaagcagatctcccaggcctcgtgttttctgtcaacagaagcttcatcccggcatcatttgcaggcattcagaatgggaaatatggtgcgctgtttttcaaggtttcacgtacctaactacctattgaaaactgagtaacttatttgaggaacttaataaacagacagacctaccaatctactccacaatagcttgtcagccttaagcttttttgttattattttgaatgaaaatcctaatgtgtctgttcacagggctttctcttcacataatgtatgatatagtatcctgtgcaatgttgtgaatggtatatatcattatgttcatcttcaatcacttacaataatttgtattcctctaattgactaatttctaaaaaccaaccttctcgcataatatagaagcaacctgcatgcaaggataaattatctcagcagcaggaagtatttgtggcccatgttctgcattactccaaaagatcctggttggcaaacagtaatgatgtgatttgtttcttacaagaacaaagactgatttggttatgcaatgaacaagttcaaggtttgcaagtgaagagaacctaaaaatgcaaaagaaggaaataataccttgcaattcttgtcatggtatatcttctggagacatccatggcaactggccagtaatcaactgcatggagattcaattcatctgacaaccacacaagctctaccctgtcaaggtccatgccagctgctttccacatctcaatattgagatagccaatgttccgtattttacttaggttgttgccaatcttataatgacgctgcaaaaaccaatctgccgtcacaattttgactgcacaaccagctttgaccatcctgttgacatagattgtcttcataatcccctgtatgatgacagatcgatacatccaattcatttgcaaacaatatattaaaagtatgaactatcagcaattaactgtttatactgatgcattaggtagagaatggcctaagtaattccaagattccctttattcatgtatttactgtttgtgtgtgctgtacctgctctatgtccatattggtggatggctcaaaccaaacacagcatgtaggactgggcttattcttcagcaggccgaggagttcatcctcatagatgcattcatctcctatgctcctcagtactgcaaacttctcatcagaattaatcaccacgttatccctacaagaaaactgacgtgccattactacaaactcttcggatataaagttacaaattccatatgaacatatgattactcgttgatgtcgaaggcaacatcatctaagttatccattgtggttgatgcagtgctgtagaagtggaagataaagctggtgtggttattgcggcggggtcggcggcaagagatcggcaaatatcagcgccggcggccgtaggtgggtgggctaatggtactgctgcggcggcggtgtattgaggactaccaaatatatatagggtaagggtacatataagatcctatatatagctataagagagggacccggatcggcatccaaccgttcaacaagcaagagatagttggattaaaagatcctattactccaatgcggcggcaacggcgcaggtaggaatggacacacggaggtgcgacgagacggcataccagcggcggcggcggcggggcatcatgcggaatcgctcaaccaccacgacgacccggacggggaccccccccccccatacgtcctactcgccgccgctctccgcctcgcctccttccccctcccctgcatctgctccgccgccgccgcctccgtggcccgctacggccgcctccccagtttcccccacccgccgtcccgacgaggctcctcgtgggcctcacctgtcagagactcatgtatctgcttccgcccctgcttctcgacttggagccgttggataaaaatctgacgtgtccaagaaaaaaaatgcggagccctcctgtcggtgtcctccaaaaaaatcaaattccggcctcttccccgttcccggttagcatttcgttctcccgaagaaatccaaacccatgcttcctcctttctcatcctcatcgcgcgcctccctcaaatccaacctgctaggatagtgacagcctgtttggcaagagaagggaggaggactaggagtttcaacgagagagttgatggtgagattggtcataggagttatatttttaatccctatccattgtttgatttcacatcgaattatctttaagtctcacgaattaacatgcctcccccaggtaagaaattggtgggaattggacctcttaattcctcatctcaaaccccctcgaattcccaagtctgatatcatgaactttcattccccatcagcaactccctacacccaaacaggccgggttttcgcaattccccaatcgagcaatggcggagtccggcgggtccgaggaattcctcaagctctacatccatggcgtcctcgccgacggcaccaccacctcggattaccgtctccttccagcatgggagttttcctcttccgagcgcgtggtggcggcatccacttcaacaacctcccggccatcgccggccgatgaaggcgagcccactggatgggaagggcctacgttggaggtggagaagctggcatcgtccaccgatgttgatgcaggtgaatcctctcaaccccaacagcccgcaagtgtttgtgtacaggagatggtaatcacgatggtgagcgccgatgactgcgtatactctctcttgcccatggtgccgatcgcactgagtgatccaggaacagcattgcccgatgccaattcttacttctctataagcatccatcctgttgaagggcgctgtgtcctcaaacactatcagaaccgaggtatgatattctaagcatgattgagatatttctgttatgtcattcttaaatgttcagaaaattcatttcctaccggatgagaggtggtggatccataggggtttagaacaaatcactgttgtcgacttgttgtcttgttgcttagtatttgaatttagtggtcattcaatttgaacctgaatttgattattgcgatgggcatatgcaaaattgggcgactagaaccgaggtatgatagtctaagcatgattgagattttttttctgttatgcgtcagcaaaaaatactttttctgttatgccattcttaaatgttcagaaaaatcatttcctaccggatgagaggtggtggatccattggggtttagtacaaatcactgttatcgtctttttgcctagtgttttttaatttaatggtcattcaaactgaacaggattttggttattgcaatgggcatatggcgactggcatcagtaacatgtattttattttacctatgtaggttcagagaaacagtgggtatctactagcatctattatttggccttgaattcacttgaggatgatttgggagaagacccaattgaattggattctcccgaggatgctttggggaaagacccgattgaattacatggtcagatatctatggagatacacatgccacctttgatgatgaaattccaaaaggactaccgctgtgaaaagcaaataggtaatgccgttacattcacatcttattgatatatgagttttaatagttaaagtttatgtctaaaatacttctacattctaggaaaaggatcggaaggaagggtctacaaatgcacttcacgttttagtcctcattgttttgctattaaagaagttgagtcaagtgagctaacgatggcatctacacactgtgaaccaacgtaccttctttctcttgcttcatttttatgtttcatttagtttgtaacaagcaacatagatcggcagattttgtatcaatgaatcaatccatggaggctttattgatattccctgatcttgcttttatttgacgcaatccttttgcgcaattctcatttaaaaaaaatacttcatccgtcctaaaatgtaaacacttttgaaggttttatggggatggttgtgattgagtaagatgagaaaaatagatagaggaattaaatgatggatggttgtgattggctcaataagagggtaggcaaaatagtgctatatttttgggacaaaatttgatcgcttgttcaaggttgaattttaagtttagaatataacctttttatatacgtctggaaataaatgcctatcaaggttgaattctagactcttagcaagaggaggccgaatgaccttattcctatatgctgttgcggccaaatatgtgaaatatttcctttctcaagttgtaatgtttgctcttaaaagaatgccattttaattatgctttttatatgtgacatgcagtgatgtcagcactcttgcacttctggatcatgtaaatattgtagatctctattcggcatggattgagaaaaagaagtcctttggctctgtgaccaatgtgatatatatttgtatgaaggaatgcgccaggtactattctgaaattggaaaggaattcctcaaattgtgtcatgaatgttgttttagtataatagtttacattgttgaccaggtccctttcagaataccttaataaacgacaagagctcgggttgcagaatgagcataatatgtttgcacagttaattgattcccttatcttcatgcaccggcatggcatcgtgcatcgagatgtgaagccgggaaacatcctcttagaagaaaactttacagtaaaattggctgattttggaataggtatgaaccatcacctccatatgtttaatatcattcaagttactaccgatgctgataattctgttttctcttttagccaaaaaaaaaaacagccaccatatatcattgacttccatgggggttggtatggcagtctgccctaccgggccccagagcttgtaaactcttacgatcgtcacaatgaaaaggtagtgtagccttactgtattattgtattaattggatgcggagttgtttttaattttgaaagttgcatcaatcttgtaggttgatattttctccattggaatggtatattttgaattactcatgcctgctaaaagagagaggaagagaaaattgaacaagcttagtgagacaatcaggaggaaaaagcaggaatacgatcagcttgatatagaatttgatttggatagtgctctggagggaactgacgtgcttacggactggaagggcgattacaacctgctaaagaaaatgacaagtccaaatgcatgggagcgactttcagcggtagaaattaaggtactcacttctttgcatttactcgtcaattttgaccaatgcagacatatttaggcaatcattttttgacaaaagaatgaccaaaacacccccttagaacaacatattgttaaaagaagttcttggtgcaacatttggcagccactgaatcattaggttcttctctagagtctagacagcagttgaaattttgattgcagccaacattactcaagatgctatacttcactggacaaccaaagggcaagatgagaaattttgcattgaaaatagtgtggtgacaagtatttgtggaagtgtcgagtgtatgtatgcaaacggaggaagtatagcatttaattttgttatatcttctcaggaacatttttcgagccacaaggaagggtagcgaagagcttctcaaaagaagaaataaccaaatatggtagatattatagcatacaaccatgtggatatatactgtaaaggaagtggtgccgtcgaaagtctctggatattataggaagagcattgctatgtctgtacctctctacgaattttctagcactacacactgtccttcccgtttttcatttggtcatttgggtaaggaacaaatgtaagtatacataaaggtcagttttgcagaattgcagtacatcatttcctcttgttggttactagtactgttactccctccgtttcaaaatgtttgacaccgttggctttttagcacatgtttgaccgttcgtcttatttaaaaaaatttatgaaatatgtaaaactatatgtgtacatgaaagtatatttaacaatgaatcaaatgatatgaaaagaataaataattacttaaatattttgaataagatgaatggtcaaacacgtactaaaaagtcaatggtgttaaacattttgaaacggagggagtacttctcaaggaagctcttcgtagtggagtcaacaaggcttatgggatttttggaggaataccctgttcaccccgttttttctttcctttctgccgtttggaccgaggaaaccggtcgtacgaaaaccaaaccaaagtttccttgataacgatttgttcacgtgaaaaaatccagctgcctcgagctccttttccgtttctttcccataagatcatcgaggcaatcaaggaaccacgcgaccatcagagcaacaacagtctcaaaaggggaaaaaaaagatcagatgaagagaccaggggaaaggaggagctcaacgcgagtacgctggctgctggagctcgcggtggatggccactgagacactgacctttgacagctcgagctcatggcggctgcagccctgcaggccgctggagcatagctgcatagaccatcacaaatcgcttcatctcacgctgctggctcgtggtcgattggagaagaatggacagtagctggacgaataaaggatgtaaaacacgggaatagaaaatatgtaagatctatgttgattatattcatgtatttctataatgctttacaattttgtttttaaaaacgtttcgtaagtatttgtcactagagcgaagtgagcgtaaccgaactggttaggttccttgtaacggaaccaatctacccaaatttaaatcatagatttaacgtgagtgttcatatttatagctaattattatttcagtggtaaagtatccctcgacaatgatgtgtccatagtgtcttcattaatatcaagatatgccggacaatgagacgtctatagtgacttcaattgacttcaatattaagatatttttttgcggggaaaatattaagatatgtcggtacataatttcggatttgtatgtattgtgtttttttaaaaaaaattatgtatagagaaagccttaataaaaaaagaaaaaaaaacctatacagtcacccaagccagcgtaacaggctagtgccctgccctctgactcatttgcgctcgatctcgtcgtcccctcggcctcgaagcgaccccgtctctcgcgagttctcccgtcgtctgcgccgatctcgcgagcagtgggtgccgacgtcgtgctgcttccgccgcatcctcgccggtgagcacccacacgcacatcctccacctcctccctctctatccacacctcttctctttgccccaatctcatcgtctcttctagatctggaagcttttcactttgccttaacctagtacgtgctattaacagtttgttcctagaaaaaaaattgggtgttcaactgaatccccatgccccaaacgctaggtccggtcctgaatctacctccatgccctgcgttcagggtagctcccttcctgattcacgatgtttcagtgagcactggtgcatttcgtttcgttttcttctagcaccaagttgagctgatggatgattacatcccatatgcttgtttgctaatttcgtgtcctatatgcatgctaaaatcctaactaacaagtaagagtcgagctatttggtacattggattcacccagatatggatgcttatcggtgaattaattaagaaacctgtccatgatttcaatgtttgttctgtgtatagtattcttcttaaagagaagtatcaatgtatcatctagtagccacattgcttttttatatatattttaaatgtgaatgatctttttcccccctccagattttaggtcaactttcccaggatttgctagtcatggccaaaggcaggatattctctgccttgttaatggtgtttctagttttggctccccactgcgaggcgttctatttgccaggcagttacatgcacacgtaccggcaaggcgaggaaatatgggcaaaggtgaactcactcacttccattgagactgaactgccattcagctactacagtctcccatactgccatccccaaggtgggataaagaagagtgctgagaatctaggggagctcctgatgggtgaccagattgacaattccccataccggtttcgtgtgaatgtcaatgaatcactgtatctgtgtaccacaaacccacttgacgaggctgatgtgaagctcctcaagcagcgaagccgagacctctaccaggtgaacatgattctcgacaatcttcctgtgaggagatttactgaacagaatggagtgaccattcagtggacaggctatccagttggttataccccggaaggaagcaatgaggtctacatcattaatcacctgaaatttaaggtcttggtccataggtacgaaggaggtaaagtcaaggtagttggaactggggaaggaatggaagtgatctcagagacagagacagatgccaagtctggctatgagattgtgggatttgaggttgtcccatgcagcatgaagcgtgatcttgaagctatgtcaaagcttaagatgtatgaaaaagttgatcctacaagctgccctgtggagatggagaaatctcaattgattagggaaaaagagcagattacttttacgtatgaggttgaatttgtaaacagtgatatcagatggccatcacggtgggatgcatacctgaagatggagggtgctaaaattcactggttctcaatcatgaactcattgatggtaatactatttttggctggaattgtgtttgtcatattcttgcggacggtgaggagagacttgactagatatgaggaattggataaggaggcccaagctcagatgaatgaggagctctccgggtggaagcttgttgttggtgatgtcttcagagaaccaacatcatcaaagcttctctgcgtcatgattggtgatggggttcaaattctgggtatggcaattgttaccatcttctttgctgcctttgggttcatgtctcctgcatcaagaggaatgcttctcacagggatgatatttctttatatgttgcttggaattgtggctggatatgctgccgttaggctctggaggactttaaaaggaacttctgagggatggagatctgtctcctggtcaacagcctgtttcttccctggtattgtctttgttgtcctcactgtgttaaatttcatgctgtggtcaaggaatagtacaggagctcttcccatctcactcttcttcacacttctgtccttgtggttctgcatctctgtgccacttaccctcctcggtggtttctttggcacaagggctgagccaatagaattcccagttcgaaccaatcaaataccaagagaaatccctgcaaaaaattactcttggctccttgtgcttggtgctgggactctgccttttggaacactattcattgagttgttctttattctttcaagtatttggctcggaaggttctactatgtgtttgggttcctccttgttgtcctcctcttgctggttgtggtctgtgctgaggtatctgttgttcttacctacatgcatctttgtgcggaagattggcgttggtggtggaaagctttctttgcctctggagcagtagcgctttatgtgttcctgtactctatcaactacttggtgtttgatctcagaagcttgagtggcccagtttctgctacgctctacattggatatgctttcgttgtctctcttgcaattatgctggctactgggactgttgggttcctgacatcattctctttcgtccactaccttttctcatcagttaagattgattgaagaccataccttacaaatctccaaggatgactgtacactgaatcactctaaagcggcaatgatttgatcatggcatgaaggccctttacacaattgtgatgtcttccttatgtagctaattaccgggactattgtaccacgatgaatatggtgatagtaatgtaccagcatatatgcttttaagcttgcattcatcatcttttatttgttaaaattttgttgattgtgcaaatgctttctgaaaagaccatgaattttacttagcatatcagtggtacattatggagtgattgctttgttatgtaagttgactttgcaatcaaccagttattatcttgaggtataacatcttgtcctggcttgttttttcttgtaacttacctccttttggcaagattccatacagcactactactagttttactttgattataatgtatgatagttcacttcatacacattttttacctgaaccatttattgccagaagtgagctgtaatcattttatttcggcatatgcacatgtgtttctagtcttttatttcagtcttctttagatttatatctgttcagtgccttatccgatttctgtaatttctgaattctgtaacagatagttcatatactttgaaccgtgctttattggataacttcacatgtgccaccattattttgaggtttcttaactacactgtcacgtaatgtagtaatgtactacgcatgtagctacacttgcaacatgaggtatatatatactgatatacaggcattaccagtaccacagctatttctgcacataaatccagaatatgtccttctgattgttgctgtaaggcattagttgcgagtgtgtttctgcttacctgtgaaaattacagggtgcaagctctgcttgttagcctgcatcatgcaaggtgaacaagtccttcaaatgctacattgtttggtagctttgaacaatacttcacacagaacccagtatccatgtatggttgatggttccatgttgacgtatctattctctggtgaaatgcgttgttaggcaacttgagcattttcatcattaggaacttctgaccactcctcttatggcagttggaacttcagtttagatggtgctttattcagtgctcagttgtcttcttgggttaatgacataacaagatgtcgattgtttttctttggggggtccggaagcaagtctcattctttgctgttgtggttttgttcattattcttccccttggtgttcggctgttattctcagtcacaacagtcatggcatacaaaatgtaccagcaaaggctgatgtcgatgtgggttgctttaagtattcagcctttacctcccccatccacataatcttctactgttctacagctctactctacctacacagacttgatctctgcagcttcagaacattactacttaagaggaaactgcatactgcttgtggtgtttgtacctttgagtggtttatcatatatcaaaacagtattcttgtatggcaaactggcatgtgctttgtatcttgctcctgatgcacaccattagccttttctgacaattgcgatatgcgctaattcaaaactgaaaggtagtatacacatgcaggtagtgttttcttgaagaaacgtgtccctttccatgctcatgcaatccatctgattttttttttcttaagtccatgtttatattttgtaggcatgtttgcaatgtttcagctatgttttctgactttttaatactattatgttttgttttctctgggcatttgtgagcagcctttgttggaacacttgacggatattcaatattatagagctattcgattacagtccttatgttttatcccctgatatcatactgttgaatgctaggtggctgctacttgttatgctgcttctgttactctgaagcttgcaatcgtaacgaattaatgccattgagcaattttcttgataaacatgtgtctacatgagttcaaaagttgctgtcaacctatccgctgtgcataactgcatactcgttttctgtattctgaaggttataaccaggtcacagtttttctgttagtcgccacatgttctgacgtctgtgacatagttcgctgtttctggtgagctgtaaaagtagagccatacgctgcttcaaacccctattccttgaagaaattatgcagcgttcagatatggctgcatgtattcttgttccctgttcatggtatgcttatgatatcatgatgtctgcactccattttgtggatgatatacttgcactctttctgttgcattcttttgtgagaaatatgtacatctacagcatgttgtgctcgcatcttcttccctggtgctacatttgcattttctgtttattattggatcaattagagtaaaacatcaaactgctacctctggccttgacacacggatctcccaacttgctagatgaataaagcagaagtttatgtcacccagtttgaaagagctgagtggctgatggattatttgttttgcgataatatttcagcgtataaatgaataaattaattacgagtaatataaagttgaaaattttgttttagaaaagtttctaagcagtttatatatataaagttattgcaagaaaatgcttaggaaatgtaaccgcaaaaggtgtttagaattacccatcatatcaattaactccataggaagaactataagttcatttgtgatcagcaaaatcagatgcatacagtggcggacacctgaaaaaacacagtatatgacaacttgacaggtagcaacatagtttaactggaattgtaacaaactgcattggtgatttggtgagtgcttgcaatcttaggttctcaacccctctccatcgtattccatgcgcacgcttttcaaactgctaaacggtgtgttttttacaaaaagtttttatacaaaagttgcttaaaaaatcatattgattcatttttaaaaaaattatagttgatactctcaccgtcccataatataagaacctaagattggatgggacagttcctagtactacgaatctatacacgtaggaaatgtcccattcttatattatgggacggagggagtacttaattaatcacgccctaataagccgctccgttttcggtgcgcacggatgattccgaacacagccgtaatctgctccggttttatatttgcgtggtgaggcaactacccacgacttttttttttttttgccggaccttgaaaagtggaggcacgatgatacaggggaaagagatggatggacggattggggccgtggagaacagagaggaggaaggggacgacgccgtgcaaagcccatatcctggcctttccagtggatgggccactgggacgggatcgaacgaatcgaacggttccccttctccgccggccggcggcgggcgtacgtcctccggcgaccaccgccgccccgccgcgacaggatgaaacccgatgtacatgctcgtattccgcagtatcgtcatcccatcaagggactcgccacgcacccccgagggagagcgaccgcgccgccgcctcaccggccgcccgtcacgtatggccggagccagatcgcgagcgggtggctcaattctccgattgctccggctgtccggcgtgccgcgcgacggcgtccttctctcggctgtacggggacgccctccgtctccgccgctatgacttgctgactttgcggggggcagacgcgcgcatggcaccagcgggcgcacgacggtgacggcggagcacagcagcttcagcagctgcaactgccaagtaactaaagctgtcgtaagttgaaaactttcaaacataaactatatactcttgtaatataattttattataactaacattatagctacaatgcaactatacggcttcatctgttggcttatgcatatgcataaccgaagcgcttattactaacttaaataataatttgcaagtaaatattttatatacgtgccaatcgataagcaaatacggtaaaataaactacgatgaaaaaccataaaatcaacaccaaaattaaattttaaattttagcttataaacatatgcgaaacgatgagatagatagtgtaattacatgtagtgtaactatattatacatttgaaagtatattaaccaaacaacttatgacagttttttcagtaattctctctctttttttcagcaagcaagcacacgtatacttaagctagctgaatctccggagtcccggaccgtttcagatagtgcactctcttccgcgtaccactactgtaccaacagtggcatccgagctgatgtgagaattcctgatggtgaattggtgatggccacagctgccggcccccaccagcagagcagagcaaccacctgacgtcatgcgtaccagtcggaccaccaaccaatccaatagccatcagattgcactgcagagtgagtgctggtttatcaaggatgattttgtcatcaggaaagctttctttatataaaggacgggcatgtagctacaaagtattagctctcttaacactaggctgaactgcccagagaagaagagagtgacaagcaagatcgaagatcgaatcaagctaccgccatgggaggagcaggggaaggcgacggccagacggaaccgctcctcgagaagctctcgaattcctcgtcgtcggagattgacaagagaacaggtcaggcctaatcatcagctaatccttcgcaagattgctctttcattttttttttgtttgcttaaatacctgcatcgagatcatccgtcacaaggtttccaatcttccagctctgacttctgaactgtttgtgctgtgatgatcttcctgacttctgaattgtctgcgttgtgatgatcttcctgtgtagctgatcttaattagcaccagctacagctagctagtaaatttttccccgtttgatcgatctatattgctggattacatatatccctacattagaaaaacacggccaaggtcgcatatatccggttagatgtagatgcttcgttaaaaaaaaaccttgtctaaaacaatatatataaaaaaagagaaaaacatggccagtcctcggaaaaaataacaaggcccagttactgtggtgataacaacagagacggcatatcactgtacacattaatttctgattatgtttcaacgtggctcgtacaaattaattaaggtgcatagtcacattgctgtgattgcccgtcaggtcactgtctcgtaacaattaaccactacgatggactgcaattgcgtgggatagatttgtttaaaagtttgcaagatcaacaagaaaacctctagcatctaatagttaatatttttttaggatatcataaacatctgaaatgacaacgggaaatagctcaaagcaaaatacgactttttttttcaatataatggaagcaaattacgacatgaagaaaacaattcaattgtgagccttatcagatagttacattggtatgaaaattttaaaaagaaaataacttaaccggcaaggacatgtctgtccccaagactttttactaagaagagaaaaccttaaccaaaacggccgagaaaagctacgaaaccttagcccccacacaaggactcccccatggattgattcttaacgtgtgctttgatatggttaactctaactttatagatacacaatcagagttgcgcgttgggccttttttaacgccgatcattcatctttgcacgaacaaattatcttaccgtgttacatattaatgtctgagttcttagaaaacactaatccagtccatgtatatatgaacaagcatatcaagttatgagcagccgcccaacacctcatatgcttgcacataggacacgagaaactgatcaattggaaggtaaagacgtcttggatcatgcgtgcgctctgtgagggaccatgagtactcgaacaatacatacaaagtgaaaacttttagctagaaaaaaagagtcatatccagcagagatatacccatatgtgccaaatataatagcaggtcacgctatatgaacaagaggtccagctccagtcatcatgagtcatgaattgcatatgcgagaggctataattgatgggcgggtgcttgcaggaacggcatggacggcgacggcgcacatcataacggcggtgatcggctccggcgtgctgtcgctggcgtggagcgtggcgcagctcggctgggtcggaggaccggcggccatggtgctcttcgccggagtgaccctagtccagtcctccctgctcgccgactgctacatttttcatgacccggacaacggcgtcgtcaggaacaggtcctacgtggacgctgtgaggttttacctaggtgatcatctccccaaatttttttttccaaattctagattctagatttttgtttgcacgtttttcaagctactaaacgatatgttttaattttctatataatttttttcatgaaatacttttctataaacaagttttcaactttggaatgattaattgattcgtttagttatactcaaatggctatcgtaaagatgatattatccgttgatttccgctatctcaaaaaggaccatggttttactgtttgcacgcacatgaagtagaatcggttgatatcatacagtacagtaggtggtatactatatggcacactgacaacaattgtgtttagtaaagaacattagagaaaaataatagaaatgcaatcgtcagaagttgcgattattgtcaataaaattaatgctgtctctttgcctcacaaggggaagtcgatgtacaagtgcgtacgggtagataggacgaacagaaaaagaaattgatcgatgatacacggttcatcgaccgatctgtactttattaatagttaaaattatcaaattgtgccattttatgctaatgacttaattaatgtcactactgacggtggatggcacgaacggtggctgcaggtgagaagagccagtggttctgtggctttttcctcaacatcaactttttcgggagtggggtggtgtacacactcacctcggccaccagcatgaggcaagttcatttttcatgtgaaactagcatcttgaacacgcgactgttacctctctatctactaaatatatttatatgctatttatgttaatagacgtaaatgtttaataacaattaataataaatatgtttttaacacattttttaagtagtgcaactataacattaattataacattaatggatttatatatcttaatttgtcattaagaatattatcgtaacaacgaataatttatcatatattaccaccgccattacctcctacaatatctaaatgcgccatttgtagtaataatgtaaatagccacatctgttacgtgttgcaattctatcatcaccagttgataagtatctatacatgtttttatcataaatcttataatcatatggtttaaatcaactttaaaaaaatattatgtcctccatgtcacatgattttttaatttaagatgtggtgaagtaattgatagtattagattatttagctattcatattttcacagatacttgttattgttgatataatagaattactgttgaatactcataggtgattttttaaaaggataattttgaaggtatttttcactctcatatctttgttaccacatattttatcggatgtgcttgaagggtctagaacatcccctgacactatttgcttttttgactgatttttctctattttgatccaacggttctcttcatttaaatcgtgcatccaacggttcatatttatttgttgatgtggctcattctagtgggatgttgatatccccttttcactaatgtacatatgatctctctcgctttctgtcattctgtgccttgcgtggcaaacatctaaccacggctttattagttgtaatgcagtcgtaagatgaggaaaagattttaactaacatgattagataaagtttattttatctactaccttctgccgttttaaaatatagcaatataaaactgaatgaaatatatctcaatttaatgaatgtggacaaggagctgtccaaatacgtttgagacggagtaggcactgaatggtgatgctgtcgttgtcctttaataatctcggtagaaggtatagtagctagatcactgttcagtggtaatatacagtcgcaatcaatgattatttaattgatggtgagggagtgtgctgatacctaacatagataaaggtccttttcaaatggacctcgcgtcgcatttgttgcatttgtagtacgggcaatgttgcatttgtagtttttttttccttcttttcttaatcagaacacacaactaaggtctcctttaatttgaagaaaaaacataaaaattttataggattttttttcctatagatatctttgtttagagaagggtatttttacccggcctctgcatccaactggatatatacagccattgaaatagggaacttacccccgcaaacaacccaatctgaaatttgttcctatggagatttgaactcagaaccttaggtactaatcaggtcactgcaaccactaggctacatgcgctattctagttagcaatgaactcggacattttctatgggttttgcagggcgattcagaaggcaaactgctaccaccgggaagggcacgacgcgccgtgctccgtcggcggagacggctactacatgctcatgttcgggctcgcgcaggtggtgctctcgcagataccgggcttccatgacatggcgtggctctccgtcctgtcggcggccatgtccttcacctactccctcatcggcttcggcctcggcgtcgccaaagtcataagtacacacgcatttaacagtattcattaatgctagtagctctcactttcattacaactgatgcgaaatggtacgatattgggaatgtggattttcatccttcggcaggatatccctttattgtttgcatgtcatctaaatagttattaaaaaaattttaaaaaatttgataatatagattaatatgaaatatatcaccccacaaacatacaagatcaaattcaactttgtacatgttgcaacaaaaagaacaaattaaactgaaaatagttatcgtacattcgcagctatatttaatatttttgttataacttgtagaagttgaatttaaacttatatatttgtggagtaatatctatgttaccatttttaaaaaaaaaattagtgactatttaggttgcatgcacgaaaagaaaagatatcccctcaagggataaatatcggataatgcactactccaacgtacgtacagtacagctaacaacgcgatcgaatgtggcttaattcgtttttttgttcagctaatggagtgatcaagggaggaatcggggggatcgccatggtgtccgcgacgcagaaggtgtggcgagtctcgcaggcgatcggggacatcgcgttcgcctaccccttcgcgtcggttctgctggaaatcgaggtaattcgtgcatgctatgatgcgtatgtgcaatgcgcgacaagctaggcgatcgaacggcgatgagccatgcattgcatgagctgagcagctagcaatggcgggtgtttgtggtgaaaggacacgctgaggtcgccgccgccggagagcgagacgatgaggacggcgtcgagggcgagcatcgcggtgaccaccttcttctacctctgctgcgggtgcttcggctacgcggccttcggcgacgccacgcccggtaacctcctcaccggcttcggcttctacgagccctactggctcatcgacttcgccaacctctgcgtcgccgtccacctcctcggcggctatcaggcaagaacagggtttgaaatttcggttcgaaatttcgctccccaccgaaatgctcatatctcacccgaaacttttgatttttttgcaaatttttatgaatttagtcaaattttatttaaatccatttaaaatcagtcaaaaattcaaaaaattccgtacggaagaaccgacccccccccccatccagcagaaaccctagtttcaaaatttgaaaccctgggcaagaagtgccactccacatgtcctctcctcgagacccctgactctgataccatattgagttgtatgcaccgatcaattcaattcaaaaacttaaaccgatgagaaaagacgaacaattcacacgtacgcatgcaggtgtactcgcagccagtgttcgcggcggtggagcggcggatgggcggcgcgggggcgggcgtggtggaggtggcggtgccggcggcggtggcgtggccgtcgcggtggcggcgcggctgccgcgtgaacgtgtacaggctgtgcttccggacggcgtacgtggcggcgacgacggcgctggccgtgtggttcccctacttcaaccaggtggtcgggctgctcggcgccttcaccttctggccgctgtccatccacttccccgtcgagatgtacctcgtgcagaagaaggtggcgccgtggacgccgcggtggctcgccgtccgcgccttcagcgccgcctgcctcgccaccggcgccttcgcctccgtcggctccgccgtcggtgtgttctcctccaagaccagctaataattgaaatgcatcagctcgatcagcaaatgaatcgaagaaagatggtctgtaaatatcaaaggaagtgttaatttgttcttgtatggagagagcatttatgtacagatcggtaaaattaaatgcgcaaaatggcacttaaatcaatggtcaatagtgatgttgatctgcctctaaaaaaattcaatggtctggatacagccatacaggatacacatacctgtaactgaagtgcagcagcatcttcaggctttagccaaagaggacttttgactcgaaaaatggaacaaaaaaaacagggagctgttgaagcaccggtatggcatttgcaacatgatttagtacttgatatcaccacaatgaattagccatttttatgacaacgggttgaaagcacacttcactaaagaataatataattggtcgtgagtgcagccgacggattacaacatgatattttacaatggcatttttacgaatttcgttcgggtggccaaaatgttgaagacagagattcagtaagtacacgggatttgaagccattcatttaaattacaaaactgacgcttcttgagtaattttttttggcagagaaccaatcgagctttattaatctagggtattggaacccattccagttctaactccatctcacctgattctacattctgcaactttaggtgcacttcctgttttaccttgcccgacacaacattgacagtgctatctttcaccagggcattgtctttggtcatgaaccaccttccaatttgcatgtcaccaacacgcgagggatctccaaaggccatgacggctgtgatcattggttgaagatctatctccgcttcccccatgatatcatcagcagagaacgtatcatggtcgtatacttcctgaaaatagagagattattatgttatttggattcagtgaaaagacagcttttcatattggctgctttatataagggtacttcattccataaatgcttcccctctctccgtcatttatttttattcaaaaagaatgccacggatggtatcacgatatcacctcattttataggattttatatacaccttatgattaaaaaaaaatcggatatggagccatggagacctgatttttcttgttaattccctcctacaaatttcaagcatcatttttttaatttccttgcaacctgtaccgattaatgtgattctaaattggagtgagatgtatgatattaggaaataccaaagctcaatttattagtattatctttatttattatataactcatgcatttttatgtagaataatttatgtatatttccataccagcccattggtgcaaataagtatttccctatgaactggtgagctagaacttttactacactcaaattgaaatatcttcatcacttagttagaactacattcatcacttgcaagatggtaataatcaatgtaatctagccaactatgtatagcgttattttaggttctagcattatgcatgttgtgtttaaccgactttgtagttgattaatcatgtttcttattgcaactaatttcaggaaagaaaactgtgtgatgatattgctacttattagtgtactacactcttccattagcagcttatggaactcagtgaaataactttgatcaaacttacaagtttaagaggtccataatttcgaggaattgatatcttaagcacctcattccatactgggttcaagtcactcggtttaacagtggtttgagctttctgcaattaggccaacaattgaatgtttaaaggaacaaattagcatagcaatcaaaatggtttatgaatttcaaaagaaaaagcatacctgctccccaagtgttagaacaacatatggatcgctcgttagcatgtctctgacggccaactgaatacctcttaccactgtaatgttcagctctccaacaaattctcttgtatcgtcctgtgaccatttgcaaggttaaggctgattgtctggatcactaaaatcatgcaacaatcattaaatatgctccatttcaatggctaacttgaacccacaaataaaatggttagacaaatcttcacagctgtatcatatatgtttcagcagaacagcttacagcgacatgcttccctgaagcgctagagatactgctagttacactcttcacagcattggtcgcatcaaaagaaccctttgatgtaatgcgcaaacttggcttcaaaaaatcttgtgtctcatacttggctctgtgtatcaaaaaataatatatcactctccattctaaatataagcatttctgcttgttcttcaaaatgtatcaagacatcctccatccagatacattttgggaaacacacagaaatgtttatattttggaattgagggagtaatattatgaataactctgatgaaattacatataattggatagataactatcaaaccttataaatttagtcctatattccatagttgaatccatcttgggttttgggtgatcttttggaagaaaagactcataaatggaatttgcatatgagtttccaccaatctcaagcatggaatctatatcactatcagaccaatcatccagagttactgacaaaacctgacaaaaaaaaagaacaggtggaagaatgaaatcagtagtgaaagctgcaaacatgaatactgattgtgtaagtaattctaagaagaaataatgggagaaaagtttgaagatacagttgcacaacaggaggattttttttcttattttgtaagaactaaaactgacaaagaaaagttcctgtggtccaaataacctttgaaacgtctggtccaagtgctctatgtacatctccacactttaagcaaagaaatactccgatattagcagacctgaaatgcaaagtaaacattgtttacactctaaatttcagatagacgacatgggaagtccaaaacaaaggtcttcagcataacatgcaaatgtctttccattagtatggaaacattagaacataataggtattcatacaaaaaaagatgccctaatcactgtaacagaggcacttacgcccatttgggatcaggtgcaccacaatcagcacatatccggttgtcactttttaacattagatccttcaattttcttgctttgcctgccatatagtaaaaaaaaatagctaaaaacttgtagacgttagggaaaacaagaagaacataaacatcattggcatcatttagggcactgaataaactaaatttggtgtgtcatgctacagcaaatacatcgtttcctatcctagtcatgaataaagtgaaatccaccacagaagttttgctattttgcaggtttatcctcactatccatgtgttgtatatcaatacaaatacatacattctacggttcgcagataatgacatactgtatataatttagtaagatatccgcacctagaacaggcttgtttgacttgatgtgttgatagtgattagtggtactcattttggatttggaacctcggatagctcacaacagcaaataaactctttgtacctgcagaaagcataaaagaaagagtcaaggaccaggttctttacaaaataagaaggctaatgtgaatttctccaaggatatataacttaaattaaaaaaagaaacatcacaaatccacatttcacaatgcacaaaaacaagtgttcagctgacacgcctcaccacaaataaggaccaatggatgccaaatttaggaggcacagtccagtacatgggtctggttatcaacattttgttggtctcgaagcatataagcagcctggttttggggcttgaacagaattggaaatcatggatacccaaaagagttgatcacatttggtcgggatttatacatttatgtaattcaggaaaaagaaacactccagcagagatggctggaatattttgaccagatgccgaaccaaacggcatatgccacttgtgggggtaaatgtgatcaccaattgtttgttccggtcctatttcttcaatgctacatcgttgtcacagttgcaaggacgtgttcgacaagggaaaaacaagaatcactgctgcagtagtctccactcgaccaccctaacagcccaacccaacgtcccatgtggatccagacgttgtctgatctcagtatctcacaatctctcaggccagcatgtagatcggcctagatcaggcagaatgacaggcttgaatacaaaaggccaggggatttcaatagctggttggttgatgtccataaattgtacgcttccagcatataactctaataaatgggcattacccaagattcctcccaggtttccacacgcatatccaaagctaagatcttcatcaatcgtgtcaacctcccgatctccgaggcaatgacaccatggtcgcattccagctccgaaatggaacgaaatggtcgaagaacaaattgagaattcagacatcaaggccccccctagcaccgaggtgggttgtgtccgtgttcgttggggaccaatcacgcgtcaagccatcaaatcaaaccggatcaaccacgcatacgacattccttttcccgcgcgaatcaacatcaagacaataggaggctaaccgcatccgggattccaaaatcagcaaaatcaagaacagcaaagcggggggaggaaatgagtgagggggaggaccaaccggatggatcgcggcgggcgggagggcggggggaggggtgccgccggcggcttcgcggtggtggtgggggggagtgaggtcgccggcggcggtggagcgatcgcccaccgggcagttcgtcgcgctgggggggcagagcctggtcgcggagagacgcggaaatggagcacgagtgcacgacgacgtgaggacggagcggaattagtattttgggggggggggggggggggggggtggatggtaacgatattctcctattcctatttctgtaagcccaatttcccatgggccaccatggcggattggcgcgttgggtgcttcagcttgacctgacgacgtcgttgctgtttcttttcttccttctccggcttcgttcggtggaaacagccctcgcaactctggcaatgcatatgagcacgcacatacacccccacaaatatgtcccctgatacatactttaaaagatactccctccattttgaaatgtttgacaccgttgattttttagcgcatgtttgaccgttcgtcttattcaaaaacttttgtgagatatgtaaaattatatgcctacataaaaatatatttaccaatgaatcaaataataggaaaaaaattaataattacttaatttttttaataatacgaacggtcaaacatgtgataaaaagtcaacgacgtcaaacatttcgaaacggagggagtaaaaactatattaaaagtttatctacatgtatgtaatatacattgacactagaatttaaactctggtaggtagagtcatacacccacgactccaccatcacatcattggtgtttcccttagcaatgcaattacgcaatgattgtttttttgaagctatgagttctttttatcagcaattcaaaactctagctttctccaattttcaagccataaacaactatagccaagctgctataagtcattttgactttttttagtcaaactcttttaattttaataatatttttaggaatatttagcaacatttaaaacactaaattagttttattggtatagtattgaatatatttaataatatgtttattttgtgttgaaaatgctaatatatttttttacaaatttggtttaaatttgacctgaaaacatcaacataatttataatatgaaacgaaaaacaatttataatatgaaacgaaaggagtatatcaaccatagtagtactagattgctatatagtactttttttcatttcaaaatatggagtatatagattcgacacaactagtgctaattcgttatatttcaagatggagagtattcatgattcatgtattcaaacttcatgtattcgtgattcatcgatgaaaaagaaaagaaaagaataatctttgggctgcataacctggaactcatttcgtcttaatctgaagcatcccattacgatctaacgtcagatattatcttaacatcccttgttctaaactttctctttcttaacacatgcgtggcacacgaggagccgcctccaactcccaagccgacggcggcaatggcgcggccgcgcgggagaggcgaggcgcggcggcggcgggtactgggcgagggaagagccgatcttcttcgcctacacgtggacaggatacggcgttcacatactaaagtggtataatcgcttcgatcgaatcgttttttctaggcttggagcgcgtggatttgtagtctcctcactcagttggggcgcgttcgcgtacatccgtgttggtgttctcgaatctggaatggaggagagagtggaggaaatttgcagctagggttcgtgtttgggatgctagtgtttggaatttgccaatattcggattgatggcccggctctccgacctatttcgtactagtagaaattattctccaatatgcgacctacaatgtgcgaccctttaagcatgtcgatgattactatggttcaatcagctttggtgtggtttcttttgattagcattggctatttgggcttcagttctgattggttccgtcaggactgttcagtcatgttgcttgccgtggtggaggagacgcttcgaaagtctgatcgaggcattgcattggttaatggttggtctagaagaggggcaaatttattgagatgtcactgtttgctgaattgatatggccttcatgtttgccatcgattgcatcatattttcagttttttttttcgaggctccttgtcaagaattgtgccattctgcacctgctcagatgcatgataggtagaattttgtttagctcaagttctcgtatccttttgcagctgccatcatatcctactagaaaaactagctgtaatttattttaattaatgtcctccattaactagttgatatgttcttttccatattcaaatatttatgggtcactttctgatgaagttttatgatatctgtcatgctactgagcccaagcttcatatagaccccaatttaagaacatgagtggtatgtgaagtcataccttgggaatctatcatgataagattggctaagttatgcgatgagtctaggacacattcatccattgaattctgttgtcgcatatgagtttttagttttcctagtctcacggacccacttcagttaattgctttggtttgcattatttagttgatgttgatagaaactcaaacaagttaagttcatattgtttacagcctttcacttggtttaattttgaacaatactcattttggagtttggacaatattagcaaaatctgcaatatgaattttcatgaaatatatattcggtgtcaatgataagttcatggaaggttgatgggagagaaagtagtatagtacttcctccgtttcacaatgtaagtctttctagctttgcccacattcatatagatgttaatgaatggctatagagttttcccagatgccacagcagattaatgctattccagagtgctgtcataatattgcactggtttgttggtttcatgataaaattgctcgttgttttgctttgctaacctcttttttgcataactgatgcaagttgcattatctgttgagaggaaatacgcagataaactagtttgctctgtggacatttgtcccatgtgcactgtttgatgtcatggctggactgctagatggacaaagcacttgccccacatgcatagcttcaattattctctagtaattcacatgtttatggcgtcattacagaacttggtaagattactttcattgcctttatttttcgtgttccaacttcagtagtccaaatcagttgagtggtatgttaagaaaatgcataccattcatctctttgagttcattaggaagtgactttgtcattatgtactctagttctcagcgccactcctggtttctgttaaaagttgaggtctttgcacctggttttctgtcaaaagaaatcttattgcatggtttccttactgattctctgcgcactattgttataatataaatctattgaatcaatctgtaaataattctcttattttatgtcattcattttacaacattttactatggaagtacctttgcaacatgtacttgcatcaccgtgaaaggagtatggggaaggcaacctgccaacttctgctattgatccaagcaactctcacttgtttatcttcagagtgattttgcagctaaagaatatgcatttttccagattttacaagttcagttccgaatacttcaggcttccaaccgaagaaatacagtgctattactacatcaagagtagctgacagtgacacccagaaattaactgaagctatgcataggggacgatcaacttgctccagaaggctacaaaccataagcatgttcacaggcacatacattgttggtagtttgctctcattctttttttagaaaaacgaaaactctcattcatttaacgtggaaatttgtcaggttaggccaccattggaggtgtcatggctaagagtaattagtactgcagcagactaattttcaggatcatctggtgaaacgtacacttactgcatatatgatttatatccatctctggccccattttatgtacatttgttttcttcaagagcaacctaccaataatatatttctccagcatctgcgccgtatcagctcttatgctgggtttcttaacaaatcactaaactcaggtacaggtaggcaagtgacagcctacaatgtggaggggcccttgctgaaacctataataactaccaaccagaattggtagcattggatacctgcactgcattccagtgttgcaactaacattttgttttgagttggcacttttctggacacctttaggaatgattatgtccacttgtgtcctctgcttgaacctttggggcagctatcgatctcatttattcaggtcgttttcagtccctacgattgaattttacccatgttgtggaaactactgaactatataactaatgatttactaatgcaggtctgatcaatctgtgatgcctgaacctccctgaagtgaaaggtgctctatcgtgatctactaacctgagacatcttgtcatatggggagaagtttcatttgctgtgtcatgagaccagcgaggaaataaggcacatatagtttcattgtcatgccagccagagcgaagacaggtaaagtttaaacttcactttctgctagcttaaggttggggtgctccataatactttggttaagtttgtattgaagtgaattatgataataccattttgtgcaaatgtttctatatatatgtttttgttgtgttttggcctaaccgttttaatagtcgaagttgcaaacagagaaattgttgtgttttgagaaattggacaaatgtcacagaagaaacagttggataacagaaactatcaaacaaattactgtactttaatttttcataaccatgattctagatgaccctaaaaattaaacaaaatgcagcacataacaacaactgcaaactggctcttcctccgtctacagccacttgcatcctaaaatacccttaaatcaatcatattaaacttgatcgcaccaatatttaataggagtcgagggaagataaaatggtaaaaagaaaaagagttggggttgatgaacttcagaaattcagattctgacttgtttgaccaacaatcaaataatttctgattcagaatcagattcagaaatatgataaaaaaacaaataatttctgatttgttttttatcatatgtgagtaaaatacccttaaatcaatcagattaaacttgatcgcaccaatatttaataggagtcgagggaagataaaatggtaaaaagaaaaaagagttgagggttgatgaacttcagaaattcagattctggaaaccaggaccaacttggcactggagtactggacactaagcacaggcgtttccatcagtagatgttgtgggggacggattctctgcccgcttttctcgcgaagcaatcaaatcacagcgctttcgttttctcatctttttttttttcctctccctctccttttccttttccaagaacagcctggctgattgggacggaccgcttggttatcgccattcatcttgccttgtcgagtaatccctctgaacctgtctttgcctgtagtggttatctgctcatctccctccatcgatgtcactccaagctcacataacctacatgcttgtgtggtacatttcttggcaaatggcagacgtctacgggtggccagtgattcgggattactttacatttttttttcttaagagaagataagtttatattctttttcgtgtgattgtttctttgcaatataatgggttttttttttctatagttatcttgaagttgcttaatgtactggaaatcgtgaatggttcaatgaggcatggaagtcgtcggcgctgtccctgtatttaggctttctttttttctacggtaatccgttgaagtctcttgtcgatgttacattttatatattgttctatactggtggttcgttcatttgtgtttccattatgttgagcagttgaaaacgtgtgtactgcgtgccctgtctgttgtaaaaatattaatatattttctttctgtgattactggaaacacctatgcaaatgcaaggagattaggagaggaggcaatcagacacctaatcaccacatgtattttatacgctgcaatggtactgtgctgaattgctgatgtgacgtggattttctctgttctctccttaattacagggagaaatttattttgatttgaagaataatcagaccgtgctattatgtagcgatggaggttgatgcatttgacagccctgcgtacaattctagagacggagattaagaatgttgtgcagactgtgcatgcctaagtataatatgtcgcaatcgttccccttattatttacctggtcagaactcagaactcagaagtagctgcgaaatgcaaaatgaactttcgtcaattcaatctgctgccacggtcctgtcccatctggtgaaggctgtgtttagttcagcgcaaagtttgaattttagttaaaattgaagatgatgtaactgaaaagttatgtaaagttacgtatgtatgataggttgatgtgatggaaaatgattgaagtttggatccaaactttagatctaaacacatctgaagtaaatatgtgtcttctcaagctcaaggtttgaaaacatgaagcataagctatctcatacaacgtgctttaagaacaaggattcacgtactgcgtgcttgtttgatatattagctactcagattattatttttttaacattcaagtgactataatagtgagtttatcctgctaggaaagcctaacttggtggtatggtttttcaaactaaactttagctataattagaagtaaaaatagtgtgattattaggcaattatctttagagtaccatgagagacgagactaataaaaatatcacgcttttacctattttaaaatcaaaccctgaaaaatacaaacgagacgtcttgatgaattcagcaatctcaacttctcaagatatatcggctcagtcttttggctgtgctcataggagtaggatgtatgtgtctgtattcatgggagtaggtatacacttgttgtgaacgtatgcattagtagtgtttctaaaaaaatatataagaagaaaaaactatacttagaaaaaaaactatgttttatttgtagtttttaagctataacacacactcaaaatagaagaaactattttttatttggttgtacagacttacactaataaatcaaaatacaaatctgaatatttagtagcttctatggactgtagttactgcatgcttgcaaagtaaaaataaagaaattagaaacttctttttgcgaggacaaaaaaaaagggattgctaaaaatatgtcgccataaaatatgatggatttcagtcggttgaaaccaaccgccagatgatcgagctggctgtctcctcgccgcgcaatggtgccatggtggtccgcgtgcatagccggccggctgagctagatctctcccacgcccatatcgtccctccgattcacttctcttcatggcatatgctatagatgatttttcttagccacttacatagtagttacaccccacttacatatgtaattagtatgtaattttcgaatttacatatgtaattttaggacttacatatgtaattttgagatttatattgtaaatgcactaaaattacatatgtaatttaggaacttacaatgtaaatatatgccgactattttttggtgaaaaatatggcgccataaatatagctacacaaaaaaaaactcgcacactcacaaggctaccatgagaaggctgaagatagaaactaccaaacccttaaaatatgtccacaccagggtttatttttttttcaaagtaaaaactgctcctcaccaatttaaaaaaacaaccaaaaatataaaaaccgacaactttgtgttaatgtgtatggagatcggctaataccggacggctttcacaaatcaagtatcaccggtttctatcaagggttaatcggttttgtgaaccctggtccacaatgtgtagatttggattgagggtacaccatggccccactgtcagtctctcagcccaaacccccatcctaaatttctcaccttcccaccccacccagcgccccttctcccgggaaaaaaaggaaaaaaaagttacctaccgccaccgaaccaacccgcagcaggagaccgagcgccgccactctccctcttgtacagtcgccgagtcgcctccccctccccgctactattcacttgacttgtttgttaccgcgcgccgctactgcccccttcccttttacccgccgcgccgcacgcccatcacgcgcggcagggcagggcaacccaagcgctcctcccctcctccccatataagcctccccccccccccccccatcctccagttcatccccccccccccccccctcttcctcctcctcctctcccgccgccgccgccgccatcgcgtcgagctgccccgcgagatcccgccgttgacggaggaggagggagtgagtgagtagcaagaggaagaggaagaggatggcgtcgggacggtacatggcgtactcgccttcgccctccaccaccccgcactccccgcgcatccccggcctccgcgccgcctcctccgccgtcgccgaccaggagaagtaagctcagcaacgccaccttcctccactgcttcgtttcgcttgtcgggggatggggggacgagcctccgccgccgccgccgtggcggccttcggaaggcgtgcggctcggctgcgatcgtggcagattcggccggttccagcgtggattctacgtgctgtgagattccccccaaggttttttttgtggcgtgaatctgatgtcgggtttaaggaatttttagcatcggatctgattcccccgcggcgagatctcccgtttgtggtagctccacttcattttgactgtgtcgaacaagtgggatgctcgattcagcgtttgctgaggtcggtgatcatcgcactgacttttggtgcttatctcgtttgtttttggggggaggtctcagtgtttttgcttagtattacagagatcaaagctgagttagttgtaggcgtgtattgtatcacaaggatgacgaatgatgagtttgtgctggtcatttgtaggtacctcgcggagctgctagcggagcggcacaagctgagcccgttcatcccagtgctccctaatagtgtacggctgctgaatcaaggtgagccctcatatacccatgccatctgtgccatgatacaactgaactaatgagtgataatactggttgattgctatttcttccacacgcggaatattctgttgcgatgtgggaatctttgactcctgtggcttgtgcacatctgtgtttgcttcatgctgtagtttgtgttaatattttctttactctaccagactgcctaagaatagatttaccatgaattcatattgtgtaaaaaatgagtagctatcggttttgagactgccaagcaatccctacttggtaatcaacaattaacttatgttttcttcctctctgttgtaaattttgattcttatcaatcttcctctctaccatgccacacattggcctcaattctttaagcttaccttgtacacaacctacttgttttagcttggccctagataccttctctaactttgcccagggttttctggactattatggttccttttgagctcattcagaatagttcaaggagcatgctgtttcacagaactgaattctgcctcatttgaagataatgccaaatgctgtttcagagatctagatctggattgttcaatgtgaggttagaatggagtatagtttgtgatttttgaatgcagggttcaaattctgacctgttttggttgaatttaggatgctatgatagtaatttttgtgtctattatcttttaaccttatccaaacacccctaagctggagcttggtgtgggaatactaaaaattgtagtggcatatctctcctgatgggtaccatctgtggtttgagtatattataaatttgatatgtccactagacaaactccaacttagtgggatgaaagccagttttcttgcatttatacctgtgaacggacaaataattacaaatcatattcgtaattcttaaataatatgttgaacataccttttggtattttttccatttgtctgcttgaacacacatcttttgttttgttttcataaattttatctgttctagtatctcttctgctactcttttttttttacattgtgcgtgataatcatttgtttgattggcataacttctcaggataaaatttttgtagctatacaactaactatacatggattcagtttgacactgttataactgttaattttttagtgtaaaggagagagagttaaatgattaaactaacccatcaggtatatgtatgcatttactaatcactaattctaactgctaactttctatatcttgtgcttgaaattgcaatgttggagcagaaattttacgtgtttccacactattggagaacgcgtcccttttaaatcaaagtggccttgaacatggtagtccactaacaactggaggattatattcaaatggagcagcagctgatatgaatgggtggacatcagcatttcaatcagaagtatggatactgaccatttaacataacttactcttcatgcctaatttaccatttttaaagcttaggttaggttttttctaactgattttaacactactgaagccggttacatgcttggtactgcttcttccttgtgctaatttgctaactttgttatcccttccaggcagtgggttcaaaagatggcattaaatccttctctttattgcaactagtggagtttggataacatgctgacactaatccactaatttggtccataggaagaaattctaaccaattagttagttgccatgctaacatcagagtcaactaattgctctaacaatgttatttgttattttatattttgtgctgcacttcagaattcagatcagtttcagataattattcatgaggcttgtaagtatctgatttggcaaaatagtgattcccttaccaatctttataatatagatataaaatgagttgtcataaaactatccttattgtcttatagatcataaatatcttgtcatcttttggggtaactagcttgtcaatggaacccatatatacgcccagaagtagttgggcacaatattgcactttttaagtttagtcctataactcttcagaatgctcctaaatcatctgtagtttaatctatttttacatttggatttaaatttctgcattttctatcattgaatgcaaagctactccattgctctgtatcgaatgctcctatttgaacaagttttaaataatcaaactgtgaccattgcagggttcaccagcttatagctggcgtggaggttctcaaggcagttcctctggactaattgttaagaaaaccatgaaggttgatatcccagtagacaaatatcccacagtaagtgtgctattttttgtagttggtatagtcgtgaatagctatatcatttatggcttcatcctcatgtgcacctgtgtttatttttctcagttcaatttcgttggccgcatccttggtcctagaggaaattctttgaagcgagtggaagcaaccaccgactgccgtgtgcttataagaggtcggggaagcattaaagatccagctcgggtacaactcctgatactaatataccgtgctttttatctcgttagataaagtggacaatttggagaattatgtattgattattgcattttaagcaagttttttttgttgaatggtggactaaagattgaattatcacaaatatatatatattctcttgaaacatagcaaatagttccttgatttaatgtcatagaaaacctgttccagcttccccaaaacctgtatgtttccaactggtaccatctattactttggttggtcttattttcctttctgatgcatctcttgtattttcattagagtttacctgctcggtgttcacttttgctagtgcacttatgctaatgttttgtaggaggacatgatgcgagggaaaccaggttatgaacatctgaatgaacccctgcacatattggttgaggcagaactgcctgttgaaattattgatacccgtctgatccaagcccgtgatatccttgaagatctgctgaagcctgtggtattgtgcttttgaacatttctgttctttgaactcttaaaatgatccaccttgtatacgatctgagaacccacgaatcattttacagaacgaatgccttagaagtaacttccttcttttgcaggacgagtctcaggacttcttcaagaagcagcagctccgggaactcgccatgctcaatggcaccctccgtgaagaagggatgcaaagatctggctcagcttcccctttccacaacagccttggaatgaagagggcgaagacaagggggtaagtgagcaagtgttcatgatgggaggaccaatcgtctattctgagaccgatgctgaagtatgcctatggggttgccttgctggctgatggcccaaaaacggtctcgcaccgccagcatcggagcggcccgtacttgataataccatatatctggagttgtgtattcctgctaccgcctaccgaggggtctggttatggcaacgtagggtgttgggctatatattgggttgtgcatggtttggtggtagctatgtggtttgtgtattgctatgaactgatatctggggttttgatataaaggccctgagcttgtatttttgaacttttttaagacttcgatctaaggatgataattgggataactcggattgaagagactttgtaacttgtaacatttttgtggttgtactgtttatcgcacactaatcgttgagcaaaattgatgtcggtattccgttgtcatacaaatgtattgcattttgcggcacctcagttgttagtctgaagtatggtgaaccctacaggtaaccattttcactgggcattgaacagtttaaaacaggatagtgcacagcagcagcatcaatgtttgcacgggccttttgctttcggtcatctgatgcagactttgccttttgtgcaatcgcagtccggatgcttcatctgatgcatatacttcgaggccttctcgagtctaagcatctgatgcagactgcccgtgactttctgcaaacaggaaaattaacgagtacactagagctgcaacgcaaatgctgcaggaaatgggacaagaacactgtaagccggagcgacaaaacaacttgccaaggaaacatttatctttttgaactacaaaattttgagtggaaattgtcactcacggtaaagcggccgctacaaattaccatcttaagctgcaggggctacagttgtgtgcctgattgagcattactggctcaagagggcgaactagtagacactaaactggatattgaaatactccaaattaagactgttacaagcctagtttacagcaaggggcacttccaccctcctgctagtgttctcggtcacagcctcataggcaatggaatgccctattgggtttccttcgcttaccaaaatttctctatacaacggtagtagaccatgcatctcagttccagaacctcaatagatgcctagaatcacttgtagctaagcagaacagaattaattacatgcatgaataagcggatgctggtgctgtctgatgggctggtggtggggagcgagcgtaggtggagcaatgcattgtagacttgctcgaaaataggcttcacgtgcatggcgatcaccggatcggttggatttatcgccatagcgacatctgtcatccactgaatcttccgcggcgtatcagtagcaatgtcaactgctagctgctgcaatagggctaggaggaccccctggttaagggggacggggaccattgagcacaatgcgcgcaaatcaacctgttgagtagtataattatcagaaaataaacatagctggtagctccacataaggtgaacaattcagggaagaggaagatacctgagagcacaaccaagacactatcgacacgtcacttctttgaagagccattgtaaatgcctcgtcaaatttgcgttcagatatcagtctgcccaactccttcattggatctaatggagcctcaacctttttacaaaacaaaaaaagcaatgcacatgtgaattatataaataagcttgttctttcatacgtcaggttatactagagtcaggaagaactatcattctcatacccaaatagacatgtcagagatgaatagtaaattaaactagacaagtcatcagatttttttaataaaaaacaaaaattcattatctggagcattaaaaatatttcaagtatttcgcacctccggtggaccagtcacagggacattgttgggctgcaaaacgtttgtactatgtgcttttgcattgcccgatgcaagcagcgccaatagtttgcgatggccatcaagcaactctgctgtaagattctgggtgatcgaagacgcagaagagatggtatcctggaaattaactcaagtagacgaatattagtcgtttgttatggtattaccataactggaaaggacattagcaccttaaacctacctgtgccctgacatcttacatacaagtgtacaactaatagttgggaaattttacctttaaagtttgcgccaatggggtatgtgttgcctcaacttgctgctgaatagcaacagtgtgttcagacattcctttctggaatgcgctatcgacttgctcaaacattgtcttgcaagattgttcaaacgctggaacaaggaaagcttccaggctagcacgtaaagcatcctgcaagaaaccatttaaggctaatcaattcgtgcaggaaagctaaaaccaatttgagcgccttttcagaaggcagcaaggcatttgtcggtgagacagtgagaagatgaagaaacaggccttaacagcaagcactatatctccggaatggatgaaaatatataccaaaacacaaaagtccaccaagtggcaacagtaatagatgaaacaatcaatcaagacagagaaatccaccaagtggcaatgttatattatgttcaactgctgcttgacagccatctataaaaataaatgaacaaagagtaaatacctgaagggtctgttttacagatgtgtggaactgcatttggatttgtctagcaacagtagcttcaagttttgcactaacagacttgtccagctgattcaccactctgtcaccaaccactttctgaaagcaaaacgtcagatgagtgatgacaacatgcagaacaagattcacaacaagaaattagccagaacctgaattgaatcagcaactgcagaggctgaacacttctcgataataggtgttattgcccgtgcaataacaggtccaagtgaagaaatttctttcttcagtgacttctccaaagtagcaggaaggtccttgcttattgaattagtgataagagtaatcatttgctgcattcgctctctttcagccttttctcgttttgcattctcctcctggatacgaacccacaaggcatcaaggttagccttgatagatttctccatggtgcgccctaatgatgcctcaattcttttgccttcctttgcaagaggtgcaacaacaatagtacccagctgcttttgcaagtccttatgcattgctatgagctgcaagacacaaacgtgcacagtaaataatctgagaacttgcaattataccttctaacttgcagctgaaaggcatatagttaacctacaatattgtccttcagtagcattgatcatgcaataaacaagtcaaaattaactaagtgaaataacaagtgatgtttttttgcttattctcgaaaaggaaacttaatttacatgaacaatagacagtaatgtcaagatcatggaactgcgcaggatggcgtaatactagatggaattacactattgtaattccatagagctgaattcaattaagcaagcattgttgcttgttttatatgaaaccaagaaaaaaaatgtgattttttatggttcctctattcttctgaaatatgttttacatgctgataaattgggggcaatgagatatagtttgtgatctctaaggcccaattcagatagagcaaaaatcaggtatgatttcagctcatccagatggaaggtgaaacttggcctctaaatgaatcaacagattccagcccatccaatccaagtggagttgagcagcttgctttccaaaaggcagccctgaaatacttttagtgctaataagaatgaggattcctctggattctaaaagcctattcagggtacttgatttctggttcaaacaatggaaacagatccaactgggaaaactctctcatagattagtaccagaaaaatgttgtgggcattaaaagctaggctagatctcacctacccaaatagatggtatagaacatgtaggacctatttggcctaggctaataaccaaactagacccaaccaggattcactggtcttcctaagaaaactatataatgcctatccacaccttgtagtaaaacaaaaaaaaaaaagagtaaagtccatcaccggtccctaaacttgtaccgttgtgtcatcccagtccctaaacttacaaatcgaccgttcatgtcctcaaacttgttcgactgtgtcatcccggtccctaaacttgcagatcactcgtttaggtcctccaacttgttcagttgtatcaccccggtccctaaacttggatttgaatatcatctgggtcaaataggacggtctaaagactttatatttaaaaataattcataactttttcatgtgaactctaatgaagacaaactttatatcaaacttgtagccctcgacgcgatctacaactttgtagttgaactttttttattttaagtcactttttgtcccaaaatgtaattttaaaattaaaatttcaaaatctataaacatgcaacaatattttgggaccctaaacagttttaattcaaaaacttttcaactacaaagttgtaggtcgcgtcgagggctacatgaaaaagttatgaattattttctaatataaagtttttagaccgtcctgtttagggaccggagtgacacaactgaacaagttggaggacctaaacgagtgatctgcaagtttagggaccgggatgacagtcgaacaagtttgaggacctgaacggtcgatttgcgagtttagggaccagtgatggactttactcaaaaaaaactaataacactgataaaatcaggattctggttaacatgccagacacactacttgtaaaggacatcatctcacaacaaaatagctaagcaacatatagctaacattaaaatttggaagtgcagtagtagcagtacacaataattgtaacataaaaaacatgcaaacagataatgacttggaatggggaaaatgcttcactaaattgttgctatgcattcaacaaaacaaatataactgtaagtgccagaagcatctagtcaaggtagccacagtgcacacaacataaattagttgaatatggtcacctgttgaagcatcccttgcgtagtaacttctggaaatgaattgataggagggtatgcactactcggaggttcatgtgaagactcagttgagttgaatgcgcttgtagaaggagatgactgcccagatgcttgaggatgcataattttctccttcttggtatatgaagatgattgctccacagaagcagaggaataatcacttttctcaggcacttcaacaggtttttttgtaacactttcgtcagcagcaccagtatgctcagaaatggatcgatcacatgatgtctgtgattcttccacactgtacttatcagttgttaccgagcgctcactaatcattttaacagtttgctccgatgaaccagcttgctttgtattctcacaaacaacctgtgctacttcaaggtccaaattttgatcaaatgtgtgctcattggtatgttttggttctacttctgccatctgatgaccactacttgtgccgtcctggattttcactccatcagacttagggacatggttgctctcagctgaagatagagcgccagatatgatttcagatggagttaccaagtgtgtagtgttccctcctaccttaaacatcaaatgaggatttggaagcattgtaacatcattgcgaccatctcttggatcatcctttccaaagttgtccttaggcatgggtgtatcttgcctagtcaaaattttaggctccacatttctgttcatcgcataatcaaaagctggttggtccatttcaaggttacctagtgacgatcctgatccagaagggtccatgtttgatgcaagagaggctgatggaagatgaacagaaccatcaccttctgtgtatgtaagtggtggagctgatggtttaggatcaagttctgcagataaccacaaaaaaataacaaagcctgaattaactacaacacaaaaataacaatttccgatacaaaaaataacaatttctgaattaactgaactaaccagactgttgatcaacggttgatgatttacttggagaaccgacggaataagaatcggtgaagctagttggcatggatgactctgctcctaccacttccagaggtgtctcgtgaacacgagaaatagatggatcccttccaagtccagtagtttcacttgtaggaggtgaacagagtgataaatccagcccatactgctggatagccattgtttgaacacaataaacttgtacaacttggtcattgccaggttggctttcatgtgtgccagtgagacttaaaataggcattgcaactgtaaaatctgctatataatccaagcgagttgaagcaggatctgtgccatactcaacatgcacagcataaatagcatttttcttagcatttgcaagtaaaataatacttgcttgaggcagcacggtaacttggttgaaaaatgcctcctctaccctgggttccagtgagctgacaagttccaatgtctgtgtgcaattccaagtctcggaatcacttggcaacaacacacctccttcattggcagaagcccaaattttaacttctcggtttagaggaccctacatcatttaacagcataataatgtaatgtgtaaactctaacaatagctgctatgttcctcaaaaaaaaaaaaaacaatagctgctatgcacagtgaattgcttaatttcacagcaggtgcaaaaacattcacgttaattaattgttctaaacgaaaatggaacacatagaattcaaaagatccggaaacactaaatatatctagcatctcacagtttatccaacctaggacaaccttaggctacaattctggctcacagcctaattggtagtccgtcactcgtaacttgacaaaagagagtgagggagaggaagggggagcaagagaggagaagcagcagcacgaggaagtggtgctagggttggtcttagccacgcacagcaagagcaaggtgagatggacaaatatagcttttggtgaggtggggtcagactactcccttcttcatattattttgcagcaacacttaaattagattggattcctctaagaaaagttagacttggattagacttaatacttatgtcagactttgaagggaaaacatcactttaatccgagtcatctacctgacttgattggaatcgctccatgtccaagactagagtatcaaataccaccctcttaaacccacatttgcagtgacccacaacactgttcctccacccagtcatgatggttactggtttcactatcaattaaatgcaagttgtgcacgcaccactatgagacatcttgttaattcattaatagaaaaaaagaaagtgtacaatcaagtgattccagtatatggagtgtacgcaacaatgagatacgtgtacttatccatcagttagcataatggattcaagctactggacaaatcttttggctagcatagcttgtctacggaagtttacagaacaagatacccccaagaaaaagtatgcataaaaaggctatgcacactgaataaaatattggctaaaacaaaagaatgtatactgctgtatcattttaaaaaaatacatactgctgtaacgaggtttatatggtctggatgctcaggtgccgtgagaaaagcaacagaataaacagcttgaccatcatgtggcttcagaatcgatagaggcactggcttgcgatcatcccaaatttttacctgcaaaacatacattaaaaatgggctaacaaagaacgattatttctctatatcacattgagtttgtggatttagggatggtggaggtgggataggggctgaaataggggtttatctttcttatgcactgcaccaggctgttttttattttacagcatggaagaatcttgggcagagagcaactagcaacaactcactagcgttaggtttcacatggcagaaaagtacttgcagttccactatttgactatttgtactacggcaaaggatagtttacattgttatttggcacggagtagttttgcaaagtaaatattgcaatcatgtacaagaaattaaataaattcagtcagagccatgaaatcaggaagggcacagacaaaatcgggattattattggataaactatatccgtttacccagtgtacctcgtgcggatttaccagtcagcctctgccaaaaccaaaagacatattttgaaatcttttgtctagaggaagtgatgcagtttcaccacgacaaacccagcatgtaaaaattaaaattaaaattatatatatatatatatatatatatctttaatcctattatttaattttaagttagaacttatagcatatcttataatcaatgaatgatcttattgtttattcgttgaaagagaaaagggaaggcttaatgacaatcaaacacaattttgaaagtaacattctggccaaagttgccagggcaagtacaaaatgagcaggaagggtatttgatacaaaccgtgccatcttttgatcctgaagccagtcgggtagtcatccattgagataaggacaaatctgtaacgtcatcatcatgcttaccaactaagcgcacaccatcaatgagcttgtcaagatgacacttgataggttcctctgcacttacgtcccttccccgtcgcactttagttgtgtctattcttaagacacagtttccaatgccaacaaacagaatctcctgtaggataaaggtgtaagtacattcataagttgaggagcttaaagtcggcaaatgtgatacaaataatgctttacctgcttatgagagtgccaacagatccttggatggtaagattcagcatcgccaacaatctggatggcaatttcaatctttcctgtaatttgtggtttgctgtcctcatcaggaccctcatcaatcttccaaacatatatccgaccatctacacttgcactgcacaataagaaatcaagttaacacttaagacccccaaaaaatccaaaaaaaaagaaccatccttaagaaatcaagttaacacttaagacttaagacccatctgacatttattttatacaaaggccataaactcaaaaaataatgaatatgagttcttcagggttagaatgcacatagcttttgcagtactaattaaaggtccttatgaacaaggtaatattttatcactacgtactcagtaccttgctaaacgatgaacatcctcagcaaagaaagccatatctgtcaccctctgcagcaaaataaaaaatatccaacacaagaaatcaaatactaatgcactttttaatgtactgaccaaaattcacaaatccacatggaaatgagtatataaccatcttgaaatccccaatgaattccttaaccacttaaattacaataggcattttacaccagctagacaaatattatttgatcattgctccataaaatgtgaattcacattggacgaacatattataactaaactaagccattttacaatcattctacagacttaacaatcaacgccatgttatcagaagcgaataatagtgtataagaacccaaaatcaagatgtttagaagtagcatacaacaggaccatctgagtacgggtacattaaaaaataccacattcaaatcatactgtataaatgtagaaacaaccagatcacctcatacataaagcaatatgccccactttgaattttaccaacctataccttccacattaccgggatcatacacatcatcatcaagtgtccattaaccagtgaaggagtatgcagtgaatacctgtgtgtggccacgaaggagcgaacggagcgcggtgttgatgtttagcacgcggatgttcccgagcttaagcccatacacgatgtacgtcctgttcacggcgatctgcctgcccaacacgagcccgggatccgatgtgtacttggtgatcggcgtcacctccagctgcggcggctgcgcctcccccggcagcctcgagtcaacgtcgtgcaccgctctgtccccgccgccgagaaggcgcccccgcggcatcttgctgctcgtgctgctcagcatcctcgccggcggcgccgacggcatcgcggggatcggctgcggcggctgcgcggcggcgaactccgacgccggcgggggcatggaggcggaggaatcgaggtgggccggcccggagctccccaggagctgcatgaggcgcgcgccgtggttctggctgggccccgcggctgcggcggcggcggcggcggcgctggggatagcggccgggttcggggtcggcatcgggaaggagatgacggggcggggcatgtgcggcgccgccatggggtcctgcggatagtggaggaacggggcgcggtggaaggggggagtcgcaggcgggtaggagtacgcggcggacggcggcggcgggcccgcggcggggccgccggggaagatgggggcggccgcgggggcgttggagggcggcttgaacagcatgctgacctcgaagggagtgctagggttggggttaggattagggtttccggtcggggtcgccatgggaggcgcggctcgggagggagggggaggaggagagtggagtggcagatctgatggaggaggagaggggcggagttggaggcgagacgaagtggaaagtcgaggtggaccgtggacgtggtgttagtttttttttttcactttttaaggccgcgtcatttgcgttaattaagcctttaattggtttgcatgtttattgctgctatgatatcatcttgcaagggactgtgctgaaattgtttgagtgaggccgggtttagtttttttttaagataatgtaatataatatcctggcctttatttaaaagagctacagccaattattacatagtagttttcatgaatatagtgtaaatttaaatgaatagaacacaccgaagagaaaaacaaagaaaccaaactaacgtaaggagatcacaattattgaagtctatttgtaaatctccaaccataattggcaaatagttgcataaccgtggtctccaactttcggcatgcaacttttagaaactcttcatcttcatcacacctttgtagttgtgcccaaaaccggacccaatgagttgccctgaaaatgacctgcatataggaaaatgatggtgatttgtcaaaaaccatatcgttcctgctcagccatattgcccaacaaatggcagaagctccaacaagtatcagtttactcattttcttatcaactcccaacagccacccattaaaaatatgagatatgataactggaagattaaaaccaaaagagaactgaactgctctctatagaaacttcgcaaaatgacaatccataaagagatgttgaatagactcattcttcaaacaaaaagaacatctaaaactgccattccagttacgccttgccaaattatccttagttaacacaacccctttaaacaggtaccacatgaaaattttaatcttaagtggcaacttaagcttccaaatacacttgtttctctcgatatagccattattaattaaagctaggtacatagacctcaccgagaacaagccattctgatggaaattccatctaaaactatcagacgaatcattcaactgaatatgtactatagaggcacacaactcatgccaacaaacaagattctgaccaactaaaactcttctgaaagaaacattaagcggaacagatcccataatagtggcaatagaagatgttttcctccgaacaattgcgtacaaagatggatatttacccttaaaagccaagttaccaatccatctatcttcccaaaatctaatttgttccccatgaaagtgtcaattaggcctagagggagggtaaataggctaattcaaaatatcaattaaaagcagaagcagtaattttcggagtcagcacaaatagcaaagtaaaacctagatctagttgcctacaacaagaatatgctagcacaaacagcaactagacctatagcggctcaaacaagcaaatctagtggagaggtgtaggatcaaggaggccgactagagggggggtgaataggcggttttaaaacttaatggcacttaaacaaaactaacctatgttgctaggcaaggtaaggtggaaggttaactaagcaactaagttaagttttgcaaacctaggtgatatgggctcaaatatgtcactatgaatgtaaatagcacaaatataaatgcaacaaataaatgagacaagagacgaggaatttttcaccgaggttcggaaattcgccgatttcctaatccccgttgaggcgagcccaactccaccgctcaaccacgaagccacagcacgcccccttcgtcaaggggtggacaaggcgggagctggcccacggagaggactacccaagcctcgatcactcggggtaattcttccttcactccgaaggtggtgaactccaaaccactcacaaacggcgccgggcctcctccacaatctcctcggagaggtcaccgggcaacacctacacaagccatctaggagacggcaacctccaagagtaacaagtctaggatgcttgccgagaatgatcaagtgctacactagctataacaatgaagcaatgcacttggattggcttaactcactctctaacacctcactagataaactaagtgcacaagggtgtgagagctcttgcaagggttcaagataatgcaatggagtgccaaaaccttaaccttgctgctggggagtgggtatatatacccccaaccaccaaaactagccgttggaaccgaaatccccaactctgtgctctgccgatcagaccgctgttgtgaggctggtcagaccggactactttgtaacagccgttacagggcaatcattgagcccactcaacctggtcggtctgaccgcagtgtagtggccggtcagaccgtccacggctcggtcagaccgccgtcggctcggtctgaccggttgtggctctggcggctctgtatcgccaccaaaaaccagaccagtgtaacagaccaatggggccggtcaaaccggctttaccacgccggtcagaccaactaacaggctcggtcaaaccggcgtaaggcccacggtcagaccgcaggtcacttttcagctcaaccgaccgttagtaaaacgacgatatctcttgactcgggtctcggaatttggcgttcttggactttatggaaagcttattcaaagggctatccaacccatgaacaatccatccaagaaacacaacttttctcaaggagaaagggctcacactccaaaggatactccaccggacataaccacatgaggctacccaaatctataggatttgcccacatctctctttgtttaggacttgagaaaactcaccacacttggctagacaagcccaccaaatacacctacatgcatatgaactaatatggcacaagatcatccacaagcttgcttcatagacccctcttgatagtacgacgcctatctagcaaatccggtctacaccaaacactaagaccgggaaaagactaagaaaacattcttagctacattatacctttgccttgcaccatccatcttggggtcaagcttgagtcgagatcaacacttgtgaccatttgattcaaccatgtttataccaagatatttaccatcatttgccaagacattcttctcatcacaagcttgatttcattcttgccaacatggcgatgtccttggcttggtgaccattaacccatggtgtcatccattagcctcatcatagtgggacctattccttttcacatctcaaaggagaacattagtctcaacaaatcggttgtcatccttcacttgatgaccaaccggttgcatatgaaagatatggatatgtttgttgagtattcattaacatcacaagtgtcatatactcgtatgcaaccttaagtgcaaagatccgatataaataataggtgaacaacatggatctagaacatgcataataaatgtataggatttgccccccctaaatatatgcatacaaataaatatacaagagatgcaagtgtatgcataattagagaatgaccaatgggggtttatcctatacacatagagaaggcatatgtagtaatgatgtagaccaacataaaacatatacattcatgatctccatgttcttaatataaatgagactaaataagatacgactcgagtaaacattagtctcacacttatataacaataacatggaaatcatatatatgaacctatcaaaaagtaggagataagaagtggtacatatcgttttatctccatgcatttcatccttatcatgattaaggtcaatcaccaaagaatgcatatctaccacatctcatcatcgggaaataacctagttaacaacttatgaaaaagagaggttaatcccataaacatcggtttatcatctatcatcaaagcaacaattacacaaattgtttaatctaagatctttcaatcttttctgctataggtacggagctttgccgctataggtactcacataagatctagatgtagggggatagtcataagggatcttagctcccttatcaccatcgttcccatcccccacttggcccgacatgatctctccaagcggttaagcctaattaggagattaggctctaataccaattgaaagtgtcaattaggcctagagggggggtgaataggctaattcaaaaattagcagtaattttcggatatttccaaaattttcggatatattcgaaaattttcggagtcagcacaaatagcaaagtaaaacctagatctagttgcctacaacaagaatatgctagcacaaacagcaactagacctatagcggctcaaacaagcaaagctagtggagagggaggaagtaaagtcaccaaaaatgaagctcacaaagttgttcccgaagttcgaatccttgaggggattctactctccgttgaggagctcactaagagccgggtcttagctaaccctttcctcaagaggttgcactaagcactcctccttccactaagggtatctcttccctttcggaggtgagatccgaccttcacaaacttctctcggccaaccacaagtagatcggtggctcgggagcgacacctagccgcctaggagtcctcaacctccaagagtaacaaatgaagcaaagaactcccggagatgatgcaagtgctcacaaatcttcacgaagtcaacaacaagcactcacacaaactcgaatccacaactctcacacacacaccaaaaccaaatcgaacacgggtgagaggggaaacaagaaagcaaggctcaaaagtgctagagagagagagcaagccaagggcacaaatgattggaatggaaacagcagccctcacaagtgaggggagggggctatttatagccacagcccagattctgcccgttaggcacaataattgagattttcggatattccgaaagattttcggacatgtccgaaaattccagctcagcaccaatagcaaagtcaacgaaagatttttcggacattccgaaaacttttcggaatttccagtactacaaaacatagttctggatgttttcggaaaagtccgaaaattgctttcggacaagtccaaaaatatacataagtgatttttgactttgctaaagtttttcggaaactccgaaaatcaatttcgaaaaagtccgaaaataaacagaaccacatttgccttcacagtcattttcggaaagtccaaaaatgtttttcggacacattcaaaaattcccagaagcgaaaattggttctgtgcattttcggaatgtccgaaaatggctttcggaaaactccgaaaatttccagaacacaccaaactgaggagaaacacttttttttaaaaaaaaattgattttgagcactttgatcactcctcatatgtcaatgcatcatccctcttaatagtgcggcattcctattgactcaaacaaaagaaaaaggtacaatataccatttgctcatttgccgcatcacacacatcaacgtattcggcgggatatgcattacgctaactcattgaggacataacaaccttcacatttgtttaaataaaaatgttagtcctctctaattgcattgtaattaatcaccaatatcattaggggcctagatgcactttcaatctccccatttttggtgattgatgacaatacgtttagaacacaagagaaaaagaatataatttaaggtttttggtgcaaaggtttagtgaaagctcctcctaagagtgtgcataaaagcaagtggaaagctccccctaaatctttgcatccacatttaagctcacaagagaacaaatatatcacatatgctcatcacatccaacacatcacatgcaaaagaataattacatctcatcacaagcaccatataaagaggataaggcattgcaccacattaaacataataagatccattacatctcaagcattcataattaaacaatagtcttacaaagcattaaacttaacataaaaaccacacatagtctcatacagataaaaggcaaatgtgctcgaccctaaggacatgaaagataatctaaaaacatgatagatagtctccccctttggcatcaagacaccaaaaagagaggacgaagagacgactcaagcgaagggcgcctgaggaggatcctctggaggtggtggaggaggatagccatagccagggccataaccaaagaagtcaaagtcaggaggcaacccagcaaagggatcctcaatctcttcatcctctggctcatcgggctcggcctcgaaacccggaggagaaggagggatatcaatgtggtggtcctcataataccttgccttgaggaacttgacatcacgagccgttttcttcaccgaattccgcaatcggcggttctttttggcctccgtagagcaaagaccaaaaagactccgcaaaatacggaataagggagatggctcacgacgagccacagaggcagggcgctcaggagcaggaggcggctgagtggaagaggaggggatgtcccgagcagctgaggagcggggggccttaataaggcgcaagtgaagctgagaatgagtcacatcatggcgaaactggagctgagtcacagtctcgatcatccgcataatgtgaggggcatagaccaaccccttcttgtactggatggaagccatgcggatctcctcccacacaaagtgataaacatgaaagcgatgaggagggggatcaaacctaagaagcacggtcctagagatgtggttaatgctgctagcatcaccatccttaagcacaaaggaccggcgaaacatccagttcaagtaggcaaagtacagcttgaggccgtcgaccttgcccaacaccacattaggatcatttggagtgtaaagagggagcaattctgtgttggcaggaatttgaagattatgaaggttatcaaggttgagcaaagaacgaagacgaaagccccaaatctcagccaactgttgataagaaacagaaaaccaggacccctgagtcatccagtgcatggcacgataacgatcaaagtagacggtggcataaaactgagcaatgatctcgttgcaccaattttgctgcaaggtcatgaaggagcgaatacccatgagatcacaatttgcaatcacagagtctatcacgggatcattgtgcgcctgcagctcctcccaattgatccattgcatgggaacagtgggatgagctgtggacttgatcacagactcataaaagtcttgttgaaagagagtacaacattgatccattgcggcgaagggagcgcggatcctcatcccggcgaggagcaacaacctcagacttgcgcctccaatcatacacttggcgaatcaccgccggatccctctcgggggtatgaaggcggagaggcccaatgaggacattgggttggtgcggcggcgtttgcggttgacgagaggagccctcaccatcaccaccaccaccatgagaggatcgccgaggagggaggttgccgccccgagccacccgcgcaccctgaggaatcgcatcctctccaccggtccaatcactgtccgaatcatcatgagaggatggagtgggagagcggtccctcgggctcctggacatgtgggaggtttgcttgcggggaggcatcctttaaacaaaaaagatacaaggaatcagtgtatggaagccaaagaagtaagaaacaagtgagtgagggcaagaatcgtgcaaatccgaagtgataggggtcggccagggattttcggacatatcagaaaatttccggacaagtccgaaaaattccggtcgaaccctataactcagatgccgcacaaatccgccaacaaaaacttgtgaaaatgaatctacaggtcctatggcactaggggaacatctccaccaagggaaatcgcaagataaaacttgaggaatcaaatgatttgattttagggcgaatacctcaagaacgtgaagaacactagaagaacgcggtgaagatcgacaatgtaggtcccaaggagggccccaaacgtgctcccacgaggttggagaggaggggagccgcgggaggtcgccggagaagaggtggtcgccggggggtcgccggtggggagggaggagggagtcaatccgtggggaaaaagagtggaaaggagagagaagggagtccacggggtgatatataaggactccgagattttctgatatttccgaaaattttcggatatgtccgaaaggatccagaagggttgcgcacggttctgatgtttttcggatatgtccgaaaatttttcggaaagtccgaaaaatcctgggattgcaacaattgaaagagcgacaggacagagattttcggaatgtccgaaaatttttcggaaagtctgaaaattcctggaaaacacagttttgcaatgagatttcgccgggaattttgatgaaactacttttcaaacattttaaaggaattttgcaagggacaagcaccagaaattttgacaaaagcaattttcacaaggatttttgataggatttaggaaggaagggatggtcgagcactagaggctccatttgaacttgtgactagcacacaatcaatcacacaaaacaatatccacaagtcaaatggacgatccgagggatcaaaagagagggaattaccatgagacaagataattcaccctcgagagagggaatgtgtgaatctatttcaagttgtgctaggaccaaaattcattgaaaaatgagatcctcatacacatagattcaagatctccacaaaagtgactagtgtccatccatgagttcaatgaccattttgtcacaaagtgatatgcaaacctattctaccaagcaaacatgcatgcaatagatcaagccacattccgagaatccaagatatttagttcacttctcaactcacaaaacctagcttcatctaaaggcttggtgaagatatccaccaattgtttgttggttctcacatgttggatgtctatgtcgcctcttgtggaataatctctcaagaaatggtggcgaatattaatatgtttggttcgggagtgttggactgggttgttggctatcttaatggcgctctcattgtcacataggagtgggattttggatacattgaggccatagtctctcaaggtttgtttcatccaaagaagttgagcacaacaactccccgccaaaacatattccgcttcggcggtggatagggcgacggagttttgcttcttggaagaccaagaaataagggacctacccaagaattggcaagtacccgatgtgcttttcctatccactttgcacccggcataatccgcatcggcatagccaatgagatcaaacctcgctcccttaggataccaaagaccaaggttaggtgtgtgcactaaatatctaagaattctcttcacggccataaggtgacactccttcggagcggcttgaaatcttgcacacatgcacacactaagcataatatcgggcctagatgcacaaaggtaaagaagtgagccaacgatggaacggtataccttttgatcgacgtctttaccttgctcgttgaggtcgaggtggccatttgatggcatgggagtgtggattggcttggcgttctccatcccaaacttcttgagcatgtccttcaaatactttgtttggcaaatgaaagttccttccttgagttgcttgatttgaaggccgaggaagaacttcaattcacccatcatggacatctcaaaacgtttggtcatcatcctactaaactcttcactaaaagacttgttagtaaaaccaaatataatgtcatcgacatatacttagcacacaaaaatatcattatcatgtcttttagtaaaaagagttgaatcggctttcccgatttcaaagccgtttttcacaagaaaattgcgaaggcactcataccaagctctaagggcttgcttaagcctgtagagtgccttgtggagcttgtacacgtggttgggatacttcggatcctcgaagcccggtggttgctccacgaataccaactcgttgatcggcccgctgaggaaggcgcttttgacatccatttgatacagcttaaaattgaggttagtagcaaaagcaagcaatatgcgaatcgactcaagtctagctaccggcgcaaaagtttcaccgaaatctaatccttcaatttgggtgaaccattgcgccactaacctcgccttgttccttattacgaccccggcctcgtcttgcttgttgcggaagatccactttgtgccaattacattttgccgaggtcgctccaccaaaatccacacttcattccaggtgaaattgttcaactcctcttgcatcgccatcacccaatctagatcatttaagagcttcttccacccttagaggttcaagagaagacacaaacgagtaatgctcacaaaaatttgcgatacgagaacgagtggatactcccttgttgatgtctcctaagatgttgtcggtgagatgatctctttggatgctttggtggattcttgggcgagctaagttgatcggtgagggtggcacttgctcgccttcttcaccttgatccaagcttgaggtagagggatcgtcggcttgggttgatgcaggtggctccacttgtgttgaggaagaggctccttgttgtggctccctatgacgtacgtccccaagagccaatcttttgattgcttcgctcggatcctcctcttcacctaacacatgtgagtcaacttgctctacttgagaaccattagtttcatcaaatgtcacatcacgcgcgatctcaacaataccggaggttttgttgaaaacgcggtatgcgcattcatttgacccatacccaagcaagaatccctcatctactttaggagcgaacttagaggatctagccttcttattaagaatgtaacacttactaccgaaaacacgaaagtaagagacatttggtttgttaccggtaagaagctcatagggagtcttcttaagaaggcggtgaagataaaggcggttgatggcgtggcatgcggtgttgacggcttcggcccaaaaacggtccgatgtcttgtactcatccaacatggtcctcgccatctcaatgagagtcctattcttcctctcggctactccattttgttgaggtgaatatggagccgagaactcgtgcttgatgccttcttcatcaaggaaactctcgatgtacgtgttcttgaactccttgccattgtcacttcgaatgttcttgatcttgaggtcgaactcgttttgtgctcttcttgcaaacttcttgaagatagcttgtgtctcactcttgtcatgcaaaaagaacacccacgtgaagcgtgaaaagtcatcaacaataacaagaccatatttgttacctccaatgcttagataagcaattggtccgaagaggtccatgtggagaagctccaacggtcttgtagtggtcatcacattcttgacggggtgatgtgctccaatttgtttgccggcttgacatgcgctacacaccctatctttctcaaattgaacatttgttagtccaaggatgtgatcgtgctttagaagcttgtgaagattcctcataccaacatgggctagcctccgatgccaaagccaccccgtgttggacttagccactaagcatgtctcatgtttggctttacttgaggaaaaatccagaaggtaaagctttcccttgagaacacccttaaagactatggaggaatcattcattctatagacggtcacatcaacatcggtaaaaagacaattgtaacccatagaacataattgagaaacggacaaaagattgtagtttagagattttacctagagaacgttggcaatggaaagatcattagagattgcaatcttacccaatcccataacctttccctttccatcatctccgaagactatgttatgttgtgaagtgccatttggatcaagagttgaaaacattgattcttctccggtcatgtgattggtgcatccactatcaatcacccaacttcttccaccggagacatattcctacaagagatcaatttctagttttaggtacccatacttgcttgggtcctttcatgttagtaacaagtgccttaggcacccaaagtactctcttgatagaaatattcttgccccttgggcctacatacttagcaacaacacgaccactagcattcttcctaagaacataagatgcatcaaaagaacaatgtgaagcataatcattaggaaggatatttttggccttaacaaaattgctaagaccttggggcctcttgatcatcacactcttgtccacctttccttttggtggaggaacatacccaagaccctcatggttgaagttgtccctttgatagcctaggtactcctttagggccttactacccatatggcacttaagtaggccattgtgaaggagtcccataagcttctcattttacttttgcaaagcactcaaagaaatagagttagtagcacaagcttcaatatcaatatctttgcatctcacacatggttcattgcttgggacaattttggaacaagatggctcgctagggagagagacactattctttaagatttcgaacttctcttcaagagtgaggtatgctttgtccaagcactctctcttggacaaagcatacctcactcttgaacaaagcatacctcatcacttgagtgatcactaacaagatcgacattaaatgacttgagaggagaaggtaccataggctcctttgccatgaggcaaacgggagcatcctcatcacttgagtagtcgaagagtctcggtggtgatgaaggcttgatggcgaacgtggcgactccttcttcatcacttgagtttgactcggagtcgtagccgaagatcatcccaaggtgagcttggccatagtgttccctcttgctatgcatgtgcttctccttcttctcatccttcttctcactcttcttcttatcttccttgatatgggaaccatccttgaggtgggggcaatccgcaatgaagtgcccgggctctttgcacacgtagcacactcttgcggagtgtcttccacttgacttgttggagtagtgcttggaagatcctcccttgaagaagccgtttcgcctcatgaacttgccgaacttcttgacgaagagagccatctcttcatcatcgatctccgccttgctcttgctcttgcggttctcttcttattcttcttcctttgccttcaaagccaagtcttccttcttgatgcttgcggttgagctttggttgatgtattggatgacatccttggactcttgcacgagcatgtcatgggcaaggatgcgtccgagcaaatcatgaggtgtgagagtcttgtagtccggacgctcacgaatgatggtcaccaagatagagttccttggagtgattgctcgaaccatcttcttgatcataacctcatcagtcatgtccttggagtcaagtcccttgatctcattgacaatcttgctcaaccggtcgtacatgtcgcttgggctctcaccatccaacatcacaaatctctcaaattgccccttgaggatctccaccttggactcacgaacactatccgtgccttcatgcaagttccgaagcgtgtcccaaatcactttggcactctcaatgccatccacacggttgaactcacttccactcaaggcgctaagtattgcattagcggcttgagcattcttgtgctcgttctcgtcgtcctccttggtgggatcctcaggattctgcaaaacatagccttttttgactattctccaaatagatgggttaatagacttcaaatgcatcttcatcttatgcttccaagcggcatagtccgtaccattgaagtacggagctttgccgctataggtacttacataagatgtagatgtagggggatagtcataagggatcttagctcccttatcaccatcattcccatcccccgcttggcccgacatgatctctccaagcggttaaacctaattaggagattaggctctgataccaattgaaagtgtcaattaggcctagagggggggtgaataggctaattcaaaaattcaattaaaagcggaagcagtaatttttggatatttccgaaattttcggatatatctgaagaaaattttcggagtcagcacaaatagcaaagtaaaacctagatctagttgcctataacaagaatatgctagcacaaacagcaactagacctatagcggcttaaacaagcaaagctagtggagagggaggaagtaaagtcaccaaagatgaagctcacgaagttgttcccgaagttcgaatccttgaggggattctactctccgttgaggagctcactaagagccgggtcttagctaaccctttcctcaagaggttgcactaagcactcctccttccactaagagtatctcttccctttcggaggtgagatccgaccttcacaaacttctctcggccaaccacaagtagatcggtggctcaggagcgacacctagccgcctaggagtcctcaacctccaagagtaacaaatgaagcaaagaactcccggagatgatgcaagtgctcacaaatcttcacgaagtcaacaacaagcactcacacaaactcgaatccacaactctcacacacacaccaaaaccaaatcgaacacgggtgagaggggaaacaagaaagtaagactcaaaagtgctagagagagagcaaactaagggcacaaatgattggaatggaaatagcagccctcacaagtgaggggagggggctatttatagccacaacctagattttgcccattatgcacaataattgagattttcggatattccgaaagattttcggacatgtccgaaaattccagctcagcaccaatagcaaagtcaacgaaagattttttggacatcccgaaaacttttcggacaagtccgaaaatttccagtactacaaaacatagttctggatgttttcggaaaagtccgaaaattgctttcggacaagtccaaaaatatacagaagcgatttttgactttgctgaagtttttcggaaactccaaaaatcaatttcggaaaagtccgaaaataaacagaaccacatttgccttcacagtcattttcggaaagtccgaaaatgtttttcggatatatccgaaaattcccagaagcgaaaattggttccgtgcattttcggaaagtccgaaaatggctttcggaaaactccaaaaatttccagaacacaccaaactgaggagaaacactttttttaaaaaaaaattgattttgagcactttgatcactcctcatatgtcaatgcatcatccctcttaatagtgcggcattcttattgactcaaacgaaagaaaaaggtacaatataccatttgctcatttgccgcatcacacacatcaacgtattcggcgggatatgcattacgctaactcattgaggacataacaaccttcacatttgcttaaataaaaatgttagtcctctctaattgcattgtaattaatcaccaaaatcattaggggcctagatgcactttcactccattattgacaatccaagaacccatatttaagaaagtacttttgacattcataagaccagaccaaaaataggaatcaccttgtttcctgtcaacttgggttatagatttattataaagatatttcctcttcaataaatcatgccaaactccttcctcattaattaacttaaacaaccatttacttaaaagacatttattttgtatctccaaattatgaatcccaagaccccattggtccttgggttgacaaatgacatcccacctagtgagcctgtattttttcttatggtcatccccttgccaaaaaaaaccgcgatctataataatcaattttacgaagaacccctttcggcacataaaaaaagatatcataaacatggctaaacttgaaagaacagaattaatcaacaccagtctaccaccaacagataaatgcttgcctttccaactactaagcttttttctcaattctctcttcaataagttttcaatctttattagaaagcttcctaaaatgcatcggaattccaaggtatttaaaaggaaaggtacttaacttacaaccaaaaatatcataatattgttcataacattcctttgcctgaccaaagcaaaataattcactcttgtgaaaatttatttttaggccagataacttttcaaataccgataaaatcagtttcaaattctttgcctgttgcgagtcatgctccaaaaagatgatagtatcatctgcgtattgccgggtttagttacaactttttcttcaaacttttactttttcatcacatcaaaactttacgacacacacaaacttttaacttttctgtcacatcgttccaatttcaatcaaactttcaattttagcgtgaactaaacacaccctgagactgaaattttgtgtcatgcagaatatgggtatttggcacttaggatgcattcgcgttgtttgatccgaatataaatgaaaacctaatggtttagtgtggactgctagaatattagttacagcatttggcattaggatttcggtttgaaatcctaccattttattttgatgccaataagaaaaacaatgcagtccctccattgcaaaatatagggtgtatttattttgttaagtttagatttggctaaccattgcttcacaaaattataatcatacttttgaagatgaatctaatagcatcaatttatttcacaaaatctacattataatagagtaattattgatcaaaattttaccctaacaaaacaaaatatgtcatatattattttgaaatggtgggagtactaaaatttaacattgtagtatgggtttttacaacttacagggtatattacctcatttatgattcctcccggcagctcaacggtagaaaaatcctggtatcacaaatcaaatcatcaatacagggtatattacctcacgatgactactcagggacatagatatcatttaatccagcaagcgatgtattagaagaaagaaaaatcattctcttttgaggaaaatgaaaatacacgagatcagataccgattctgatacgatctatgatcaagaagagtagtagtcctttccaagtagacgttgttttctgatctccatgtataatagtaaaaggaaacactttctgcatagatttgcttcgagaggtcaaggggatatgcatgctagtatcacgctaatgccttgtttaacaacttcgagaccggatctgaactgacggtggcgcacagcggcgtaggagccgcacgattcgcgtgcgcgcgagcaccggcgccaccggcagcggcacggcccggcgcaggcgcgcggcgaggtactacggccgcacatgcgcctgcgcggcaacgagtacagcggccacatgcgcgcggcctcgcttatcgggccgggccatcataaatcttcaggcgtcaggtgcgcctaccaaacgacgctggaagttttttttttttttcagggcaaagtgtgcgttggaacgaatggatgaatttggccggtgttgaattgatgaattccaagaggagcagctctgaaattgctcgaggaaactgaattgcacaggtctagggtacagtctacagatcaatgctttgtatggtccacgggtccagaaataatttagtaccctcgccgtttcagaatatgtttatttttcacatatcttaaatataccagatactctcactttatcatatcttcgtacaattatttcacttcttatatatttttaatgtatttattttttaccttcataaattctagtataatcattaaaataaacttattttgagataaaagagagtagctaaaaatgaacttattctgaaacaaaggaagtattgcatatttaggtttatagatagaaatttactattactacagcctgtccaggtgacatgttagtatctcttaaactgcagggtaatcctcactaaaggataatagaacattacagatatgatagtccaggattacatttactacttaaaaattcatacacgagcctctctctctctctttttttttgtctccacatgtatatacttttcttttttatgtcggcgaaaaaattaggccaaccaagtttcatttaagatatagtaaaactaacatgcttggtttgacctactgctagtaattcatttcgacagaatcgcttgtgaaaaactgaaaaacaatgcaccttagatccaccgatgatcgatgtcagaatcagggggcgaagtcacgttgtgtttccctggtgcattgggacacaggtccgaaaattttccatccaaaaaattttcagcgaagcatgttcttttactgcatatgtaattgaatagttaaatgtgtgatactcctattcctattccttcgccactggctacagaactccaacatagagtcaatgtccagtgaggtagcaatcataattaattaattcacaattcttttataaccttggacttaataatattcaggtcgtgacactagactcagccaaacgacaactgttcgaaacatgtaggagtactatcattttcaagctcctttaatgccatcgcgactaggacaagagatattaagatcaaagcaacgcagatgaagatgttcaagacgccgcctggaactgaattttgattccatccctacaaaaaaaaggatgcttccatcagcaatgatcaaaacaatacagttttcacatttaaatatttatcttctacccaaaaaaaaaagataataaggtggcagtatatgatctaagctaactgtagataataaggctcaggtgtgacaggaagcaataatctttccaagcacgctaaggtagcaagtgtgagaacccaagaaacactccatagatgaaaacgagaggggtatcaattactgtaaaaaagattgactctcgagcagccattccgtcttcgtcatcgtccaccctttccatggtagcatcaccctcaacaacctgaatgtgatcaggctgatgttgacagattctgaccaatccactatcgatagaaagcttaatcctgcataatcacgaaagagagatcaatgaaccaaagacgcatcatatgtgcaattaaatactcctggcagatattgaagggcacgagaaggcgatttatcagccctaaacaacactggctcaaaagttatggggctgtctatatatcttgtgacagaaaatctcacatcctatcattcaaattttagaccattgaatatgctttaagattcgtgcaaacccccctaaccctaactcctctcctcatcccccgttcagatcgccgccaccactcctcctcccgtcctcgcacgattccccgccgccaccgcccgcctcgccggctggccggaaagagtcaactgcgccggcgagccccccccttcccggcaagccccctcccccttccccccgccccgccatcttccccgtctccggcggctccccgccgccggatccgcaaccaccgcccgtcgcctcctaaccacactcttgctctgccccccgccgtcgacgccgtcccaccgccctcctccatcctcgcagcttcggcggcgccgccgccacctcaccgcccgatgaagtccaccgcccaccgccggtcctccgctacccacggccatccctctaaaccccgaggaaaccccctcttccctctccccaaacccccctcctaccctcatcccaaccccaaaccctaacccgtatgctccctggagttggggtgtcaccggcgccggagaagaagaggagcccgccggagttggaggagagaagccgatgcacaaatcttggcatggatccaatggtccaaaatctgtaagatttcatccccaaattttattcgaatgacatatagcaatcccaaaaagttatcgacatcacgagtttgtctgaagactggagaggagaaggcgattatctgcttggagttgtctcttcagaaatatgacgagatggtttctcgctaggatttacaaaatcgtgtggttattatggttatcacgtacggtaaatttcttaggtttttacctcacggtaaccgcgtgattaccgcggtaaccgttaaaccgtgcggtggcagtaaccctaccctaaatgatttggtaaaccgtggtgtggtcactcaactgaagcttaggcaatgaactccatcgacttctttataccacacagcctacaaggcagtagccaatagaaaatggtacagcttctttaacacagaaaagccacggtagtaggcaacaattaagaaggatatgagtacaatacaggattgacaaaggatggggcaaggcaatcagtatcctgtattcatttaataattaatcacagtttggctgctcctcttactcctcttagaacaagttcaatagtatagccaactactggctccaattcatctatagccaatctaatagcacattcatacaatagttacattctacactattaatacctggtcccacctatcatacacacactgtgtcttggagtccatgctacaggtggctacaaatctgtagcacgctgctcttctctctctttatttatctccttaaaatatgtttgcagctggcttatagcctgctattgtacctgctcttagagttatggattgacagatataagagcaggtacaatagcaggctattagtcagctataaacatattttaatgagataaaagatgagagataagataagcaggctacagatttgtagtcagctgtaacacggactctaaaatacagtgtgtgtatgacaggtgggaccatatattaatagtatagtaatcaactattgtatgaattgactattagatttggctatagataaattgaagctagtaatgagctatactactaaacttgctctaaggtagacctgtcactgcaaaatgttcactgcaaatccacaaacatgacagctaaactacctaatcgtaaactatatgataaaccaaagctagctcggcatatgcatggggaatgagacttttgccgacaggccgcgtcttcctccctcgaggcctcaatgaataagttcatttaaggtcccttaactttacactgagtccgatttgcgtccttcaacgaaaaaaccagatataatcggtctctaaactatcaaaaccggtgcgaacaagatccctcagcagtttggaaggcggttttagctgacgtggcgccaacgtggctggtttgacttggtcatcatcccacgtggcatttgacgtggcgcttacgtgcaattcaatcccagaaaaataataaaaaacgtggccccacatgtcagctacacataaaaataattaaaaatagtggggcccacgtgggccccacatgtcagccttacctcccttcttttctctcttcttcctcatcctcgctcctatcttcttctcgctcctctcttctttccggagccgcaccccgtccggaggcgctccacctctggcgccggtatccgctccagcaactccctcaggctgggcacgtcggcgatgatgggcttgaggtagtccacgtacgactcgtgcgcgtgctccgccctggacatcgacatgcatgcctcccgctgcttgcggtcgtcgtagagttgggcgaagaagaggtgctcgaccgtatagatcagtagaaattcagacattccaaacaagctagtatttgcagtaagaattttcagaaaaagaaataaaaaacatgagcagatccatggctagaagaggacaccacctacccaacacagtgtcgtcgcatggtttgatacacgctctcctctcatctcatctcgtcgccattgacagactagcggcgccgttggcctggtgcgcgacgaggcgccttcccgggcgagcgctgctactgctgcggcggcggcggcggcgggcgtcagctccggatccgcgagctccccgtctcgccggcgacctcctcctccggccacctccgccgctcgcgacctgccgctccggccacccctctgctccgcccgcgacctgccgagtttccccccaccccggccagcgctcccgtcgtcgccgccgcgtcgccggccgccgccgccgccggacctccccggcgccttgagagagagagaggagaggggagagagatgaagaggaggaaggaggctgagaatgatacgtggagcctacgcaggccccactattttttaattaatgtttttagtgtaactgacaagtggggccactttttttcttaatttctaaattaaattgctacgtcaatgccacatcaatgccacgtcagatgaagaccaggttaatttaaccacgtaggcgccacgtaagctaaaactgctatctaaaccgctatgggacttatattgcaccggttttgatagttgagggaaccgttatatctggttttgtggttgaaggacaaaaatcggattcgttgacaagttaagggaccttagatgaacttattccaggcctcaataaaatcttcttggacgtggttctggcccacgaacggcccacgtacttctaaacatgggccacaacagaggagaaacggtgatttctgtaaaacgcaaagaccaatccacgccatgcgtatgtgatccaacggctcccagagttgcaaacaccaggggggattttcacacaggtttcctccagtcgtcggcgtgagaaacgacagatcgccgccgccgcggctccccgtcgcaacgccgccggggaagaaagaagaggatacgccggaagtacgataacgaaaggatcggaggaacgcgtcctggaggccatggcatccgcgctgctcctgcctatgaagtgcctcagccgctttctcctggggatttccccaccctccacgtacgtacgctccccattgttgatcaatttagtctctggtgtgaatgatcgaattggttgttatggaggagtagtacttagcacaagatcgtggttcattaattaaaccatagctaacattgatgaaaagtttgatagagtttaatcttgtcattaattagaatatatgcatggttctattttgtttacatgtagtataggtcactgcatatttagtttggctccagctcattggcgagatgccgacgtgccgtgcgatgcggtggtgcgagaatggagcaaacaacgttcatgaagaccaagctcaactgcatgtggagtgctgcgagaagtagccgaattgcaagtaaggcaaggtcagtattagccgagtgaatcggtcctagctgtgcatgagatttagttgttgctagtgattagctgcatgtgctgcgattagtggtaatcatgtaaagggatttcttggcaaataagtaggattagttagttacttagtgcatgggcatcccacgtttgtgtgcatggcgtgagttgtggcttagtgggtttggccattgttatctctttgcatgtactgagtctatataaacaagaaaacgatgtgagctagttggctgcgtcaaccaaaagcttgagtgtgttctttcagttcttctgtgagtgtgtccacgagaaagaaaatttgagtgtttgtgattaacacctagagagtgaggagagattcctaacaaagttttcagcatcgcgagactgtaagacgagtgggaagaaaaggccaatgacccgctaggagttgtctcttcagcatataagaacgaggaggataatatttcatatccgctcgtgagagaacagatagtccattttcaataatgcactccactagagcttagatagtgaacttcatcagaatatttatgccacacaagcatataagcataatgaatgacatagcttcttctgcacagtgccgatcgagcgcagagaaagcaactgtagcaggcaggagagggagagagagagagagagagtaaaatacaagagattggataaacttattgtcgggaaaaatgatttggacaataactatacgcctatacacccagattcagccaaataagctgtaagcacacaatgccaatatatgtaaggctgttccttgaatatgaactgaaaatagacaaggtaggcggtcactctcaccaccgtatgtatcatgtaagggtttactgcaagccacaatagaggcaaaaattaaaatagaaatggatcgtgcatgtgggctaattaatcatggaggaatctgatgactactattattattacccgaaaattaacagttctcttcatttcttgcagtagatttgacatccaaaccacttgatggtgaaccgacaaggcatacaagggaaaggggtagtgaagttacctgctaggggagagatcttgccggcttgctgccactcctcccgaaagcaatctcgtgttgctgtcgccagtcgacaccaccacgggcacatggccgccgccaagctgcagtgcctgaccgacgccgaatccgaatccgaccgcgagatgcgcgtgcagcgttcgtcggtgactggcgcgagatttaggttgtgctaggttatcggtttcactctgtcacaattaaggttgaataagttgtgacatctataaaagtttgatggataaattgttaatcacaaagaatatgtttgattggcaactaaatttgctacacctaatcataggtaagtcaaaattttagtagacagtgttcagttcatgctataactttgctttgtctaaatcttagtcacttgatctatgtcatacactttatttatttgtctaactttgcctatacttaatttgtcattttgtttgctacaaaaatgtgacaagactaagcttaaccgtcttactccgtagtaaaaaaatacgtgacaatatttgtccctaaccgatacatcatctgaattctgatgatgaggcgttttctctgatccagacacgcaggtgatgtttggggtcgttgggttggtccgcgttcttgcctcctggttggccgatgtttggtcactgtcgaattcatcacatgccacacaggatctctgcagaaactcagctctgggcgatggctcatgcagcgtctctgcagaaactcagcaaaacgcgcgacatttgtcaaggcaaggtcggtcggggccgttgctctgctgctggagatgtactgcgcacgtctacgcccccagtttttcctttgtttttttttcttcatctattctcttccttcttttctgttctgcatttctgtcgcttcctctgcatgcaacactatttccagctcacctcctttactttctgagacaaaaaccgaagaaatgggtagcaaaaagacaaaaggcagcagccgaacatttccctttccgtttgtagtttattgaacagcgagtcaatgttgtttctcaaacatcctcccgagtgcccagccccgagttgtctttggatgtttgcactgtcccatgacgtgatgccccttccccttctagaccatgacatggagacacgtccagttggaagtggaagcttgggacacgaatccacgcccagaacacacgccgttttctgcatgtcacggccatctcgtgcgtggcttgggtatccaaaacgcgcaccaacccagcggccgtctctcgtgatctcgtcggtctcgtcacgcacgcccgctccgctccgcctgcgcgagctacacgcgcgaggcgacgcccatttttgggattttggacgcacgccgcggcccaaccaccctctcgtccccaccccgctccgctaaaacctctctttctcccttggcttcttcctcccgagctttctcctcctttggtttctactcgagcttccgcccccttgcgcacggcacggctgcgcgaggcctcgtacgcttcctccacctccggctctcgccccgcgtgtcagtgcccagcgtgcgccatgcgtgcgacgacgggcgcgcggcatcttcaccccccatggaggcgcgggctgaggcaccaccgacagtcgacgatgccgccgcgcgccagcagggggaggctcgccgacgcggccctcttcaccgccggcgccgtgctggggtccgtgctgctgctgacgctcgcctcgcccttctcctcctcgtcgtctccgtcgtccggcgtggggagcggtgaggtcgaccggctcggcggcgggcgaacgttctacgacgacccgggggtggcgtacaccatcgaccggcccatcgtcgggtgggacgagaagcgcgccgagtggctccgcgcgcacccggagctggctggaggcggcggcgagcgcgtgctgatggtgtccgggtcgcagccggagccgtgcgggtcgcctgcgggggacagcttgctgacacggctgctgaagaacaagctggattactgccggctcaacggcgtgcagctgctgtacaacacggcgctcctccggccgtcgatggacaggtactgggcgaagatcccggtggtgcgggccgccatggtcgcccacccggaggcggagtgggtgtggtgggtggactccgacgcggtgctcaccgacatggacttccgcctcccgctgagccggtaccgcgaccacaacttcgtcgcccatggctggccgcacctcgtgtacgagtccaggtcgtggaccagcctcaacgccggcgtgttcctcatccgcaactgccagtggtcgctcgacttcatggacgcgtgggccgccatggggccggactcgccggagtaccagcactggggcgccgtgctcacctccaccttcaaggacaaggtgttcaacgagtccgacgaccagtcggcgctcgtgtacatgctgctgcagagcggcagcccgtggcgggacaaggtgtacctagagagcgactactacttcgaggggtactggctggagatcgcggggaggctcggcaacatcacggagcggtacgaggcgatggagcgcggggcggcgccgctgcggaggcggcacgcggaggcggagcacgcgtcgtacgcggcggcgagggacgccgcgctggcgggcgccgggctggcggagagcggggtgagcgggtggcggcgcccgttcgtgacgcacttcaccggatgccagccgtgcagcggccaccggaacgagcactacacggggaagagctgcgacgagggcatccgccgcgcgctcagcttcgccgacgaccaggtgctcagggcgtacgggttccggcacgccggcccgctcagcgacgccgtgagcccgctgccgttcgaccaccccacgcaaacggcgtgagagtgacgtggctcatcagccaatgaaaccgtcaaagctgttactgttaaaccgtgcatacagcagacagcttttgctggtgtgtgcggggtgagttttcgaggttgattgcttgctagtacagcggtgcagtaaaatttgttttgttcttcgtgttgatacagccaaacaggtctatataatgattgctttgatcttcgatgagtgaagcacatgctgcacacctcaggtgtctcgctcatcaacgccgaaatggtagatgttttcagcaactgtcgctcggcccaggcattcaaccagaaactgtccgcataaaagatcaactctataatttagaacaagcaattattgcgacacagttttgtcgattatttccccttcaattgcgcgacgtacgcatcgcgctgaaagcctgaaacaagcagcgaaacgcatctgccgccagggaaacatcaactttcagaacttactactgataactagagcggccacttgcaccgtaagtaaacagacaagtagaggctaaaaaacccaaaagaaccatctcattgtttaagccagttaccccaaggttagcaattagcaattctgagtaggctacttcagccatttctagcaacatttgcagttagatacggtagtctctgaactcaggttcaacctatcagacctagataagtaaagtgcacatggcacttggttgtttttttttgcatacacagcgcaacctgatttgacaaaacattcagaacattaaagacaaacgcaagttgcgaatctccatttcttgatccacaacatatctgtttaagattcagaaggcaactgagatcgataaggtgaataatcaggatagagacgtatggctaacaaaaaatctccacagggattaccggcatagcttcactggagattcacttagcagcttttatgtcagcaagcgcagtgagagcctccatgatgggactttcgttgagtgatctagtggcctattgataataaaggattttggaggcgttagttgctaataagtttagataacgcaggactgaaattagaaagaaaaaggctgaccttcagggatggtactagcgcataaacctcttcaatggtctcaggtccaacgttcgctatcaagcacatctgcaatatgtgccaaactgttttagaatgctataatagattataaaggagagaagggcatttaggggttacagacctctccatcactaacaccatattttctaagagggctgcgtatactagtcaaggaactgaagaaccaattagcttgcttgattaaaattaaatcgttgtacagttaatatatattaatatgccaagctcgaatcaaattaaaggatactctaggacttgtttcacagactgtgcggtggaaaactgatttccttctttcacatattggaaagccttatcaaatgacctgcagaagaaacagagtaaacgagtagccaaacaggtaaaagacttgcaaacaacataaagaatgactagtgagataaaactacaacacaaaaacataaggtttctaaattcttactctggaattttgatctttggatcctctgataagatagccatatgctcatgaatttcttgcaatagttctgctacttcacaattcattaaaatgcaagagtttggaggcatatctgcaaccaggtagaagatttagatacttttcatatgggaaaggaagcagagattggcttgcattttttctgtagagtaaaagctcttggagataatatgtctgtcattcataatgatgtcaaaatataaaaaccttcattgagaatggttttccaaatttcattacataaaacttttcaactaaacagcttactaatataacagaaattgtcatgtttactatcaaactattcattcagtatagaaaggacaaacagaaagctgcatttatggtatttcatagttggaggctgaccgagctcaagctttagctctgcatcagactttgcagaaactcgagctgatgcagaaccctttccacctttgccagcattccctcctttgccagtttgtcctaaaaaggaaaagaaaatagagcttaacagtaataaaatagcacatgaaagaaataaattcaagagccacagaaaagtaggacccttggccctggcactttgagccattgcagatttgaaagatatcagcagctttagaagcaaaaaagagtaaaatgtgtatctatatacctttagatgaggccttcccgccagtttttaggctctcagatgcagccttcccatttgttttagagttgacacgaggcagttcttccacgaaacctaagcgcatgcagtgataaatgatggccacggggttaaaatagtgtcatcatattactcatatttcaagtgccattcaactgccacatttgtcccataattttatcttctcaaaatattgaatagcaattatggcataggcagctccatcattaaccagttatatgcacatacatgagtcgcaattggatagcaatcagcataacatcacactaaaagcagtatgtgcattcagatcaagtgtaactgcaatcatgtatcaactacatcgtctagcttcagtaaatgaaaaaaaaaaccctaaaacatggtatatattcctcgaagaacattttccatgcagtagtttgatcaacaatgtgaaggttgccaggaaaagtgaaatagatactttatgagagaacattgaacatgtctgatacagcatgtgatggacatattggagcttgcggtcaacaaggggaaaagaaatgctacagtagtcagattagtagtcgtacggaaattaacatgcggttagctgaaagcaaaatgatatatcttgtttctaaaagtaggatttaggtataatgtattactatgtgccatatttatttccatatgataatgcgcttaaatcagttatagaagccattgcatgtatgatgtatccattataatggacttgaatttgatgaatgaatttctagcttgttcgtgtttctcctacaatggagtgaatttctcatatttttatcacaatggctgtgggtagcatgatgcggtaccaattcatctacctgtgctgagtttgtgaattgttgattattcaagtggcatatcatgtgcacatcaacatgttagagagttaccatatagatattcagccatgagccaagttacctcaacacagtgaaagttcatggaaagtgggacaacctaggacatggctatgctcgcacataacagtgcccttattggcatgcccagaatgacgtgctaaaaatacatttgctggttttaaagaatttatagagcggattgtctgtagcatgaaaatcggaagtactgttaccttcagaatcagaatcggaatcaatattaacatgcgggatattggcagagctgttttgcctaagtgaacctgtaaaaacattcattggtagatctgtcagattattagttcgaaatcacaaaatctacagcgcatgttttgaaaaacatatataaaaatcaacacttaacaggatcacaaaattacacaatagatggtgcagcgtattgcatgacagcattagttgcaatgatccctctcagcagacaaaagtgtgcatgcatcaattattcaattctaatttacttcttaggcaatactccatcatagaaacatcctttaccaagagagtataacccacagaaacaagggtagatctaagaaaaccaatgtttcacaatatttgtggtgtaccaaaatgaaaacatttcttcattaactgaaacctaagcaccaaaacctgtcatacaattgatcgccaataacaataagggtctcttcagcagtgagcaactacatgagctgctctgtaaaattattctaaagcgcactactctgttttatctattacattcacgccttgagcaactctctccattcgccaaaggatgtcattttcacatccattccagagactaatacatcttttactcctgataaatgtgtaaacattacccctcatagcaattaactaacctatctctcgacattctggttacacggcgctgcattctcttaatcaaaccattaattgaggttggcacttagatttaggaataaatgaactgaatagcattggcagtacggaactcatgccaattacttataacagtggtattacaggaaaacattacatagaaaaccttaaaagggcatctatttgaggacaaaactaactacctaaaactatatctagaaaggacggacagggaaattaactacctttctgagattatggtcaaaatgaagccatatatatatatgagacaataaaaacatgcgggacaaccaaggaagagttgcgagacaattaattaagaagcggtgagcgtgctcagcgtccacatttgagacaatggatcacaaagctgtcagtatgtttaagaagtctaacaccatgtgagccagctatagttttttttttactaactcaccgggggggggggggggggagtccccacctgaatttgtcattgcatatgggagagaaatagagttcgttacaataagtttagagtctagatggaaagagaaaatctgtttccatacagaaattacatgtcgatcctcaatctttagattttctgcccagagggctgcctcacaatgcaatcgtttataaatgtattctaaccaacaatgcaatcgcttatatatctttgctttacttttaacaaatttctgtcacactatttgatgaaaggactgtctttcccctctcctctctggaaaagagcatatcccccaagcgcaaaacggcattgccatacaatacatatctgccattccaccgaataccgcgcaaatcgagcataacccaaatcataagcccccacgattacataagtccatgcctttaatagccacactacaaagcgaaaaaaccctccgcacagcataaagccataaaccctagccccctgccattggtcccgtactgtaccgatccccaccggtaaatccgaaccaccgtctcgccgagcgagctataccaccgtgaccgtgaccgagagccgagagacagcaacgacaaggagatatcatacgccgaacagagagagagagagagagagagagagagagagagagagagagagagagagagagagagaaatgaagtttcagagggggcgaacgggagcgcggcgacacctttcttggacgcgatggccttccccttggaggccgcggagaagcccctcgatcccctctccgccatcccccgcgtccgccggaggaggaggtgggcggcggcggcggcggtggtcgggaaggggacaccggagtcgccgacgtccgtgcgtgcgagagggagggtgggaacaaccagagggaggagtcgctgtgtctgtcggatgcgagccccttatactgtcaccgtgtcagtttgtcacggcgggcctcacgaggccgattcgtgggccgtaggggaatgggcgcggcccagattgcatagaacgggcctgttttgaggagttttggtaggcttcaaagtcactggcctagctcctgaaacgaatctgaaagggcctgtattgaggagttttggtagctgcatgttttctcacagtcaaaaagaaaaagcttgaaattcatttagaatctgaagcttaaaatttagaggagcttgaaattccaagaaccaggtgattcgtagctggtagcttattagaatctgaagcttctgattctagaagaacttgcaactagtagaagctccccaaacagatcccattttctgaattctaccgctatagtttctcaaaatataaacgaaaagctaaactgtctggatgagttcctgattctgagagaagttacagctgtcaaaaactcctcctaacatgcccagtatagcttttcgtccagatcaaatcagttgcaactgatttataagaagtggcacgccaacctactcaaatcagtaacgattcttacaaataagctagcgacatgacctcatgattcattccctttcagttgcatccctttaatcttggcaagccctacatagacaattctgctggtctttaggcccatgatttacagtagcactgctactggatctccttaatttatttccctccaacaagtagagtttgatttcctgatggaaatttaaccaagtttagccatccatcatgaaatattgaaatgccaatcatatcatcatcgaccgatgaattttcaagaaaattaagcatgcatgcaggtggccaatccctttgcttgccggcttaggctgagttcggatgggggagatgggaacctaactcctgtgcacggaaaacggagcggtccattaacacgtgattaattaagtattagctatttttttttcaaaaatggattaatttgattttttaagcaactttcgtatagaaacattttgcaaaaaacacaccgtttagtagtttgaaaagcgtgcgtgcggaaaatgaaggagaggggatgggaaaaggtgcatgcgaacacagccttagctcccttgtagctagccttcttcctcactctacatctgattgcatgttttgtccccaccggacaaacgaaggccatggatcatggatggaaggatgcatggtcgtcgtctaggacatcatcattagggccatggctgagcaggttcatcgtctgaccagccaatggtgttacacatgacaatatatggcatgcatcgataattgcatcgcgtataatgtgttagagcaagtttgatagtatagcccactactagctctaattcgtccttagccaatctaatagccaattcatacaatagttgtttacaatattattaatatatggtcccatatgttatacacacattgcgtattgaagtccgcgctgtagctggctacatatcggtagcccgctgctcttctctctcatcttttatctcattaaaatatgtttgcagctggctaatagtctgctattatacctgctcttatacgacacattatactatctctatctattcatctagattctataatctcactcgtatagttgcatattatcttttttctcaaacgcgcaaaaggattgcatgtcaatatattagaagataagaatattcgttacacaacgcattaagccagaccgatttatgccaagagaggagggaaacaaaagactaaaggaaaaagactcggaaagtacaactccaaccagctggaagggggtagagcccactactctcccaataaaaccccaatagctgcatattatcgatccaagtactgtcatctccagttcagagtaccctgaatggggatcgctggatcagagatgtacagccctgcagcttgcaaacggctgccactctgttctatgaaaggcattttgttaattacatggtgttcgatcgttcaggacgacatgaagataaagagaaggttgcagagacatgcattggctttaggagtgcacgcttgcattgcacacaaagcgctgaacgccatcgatggcaatcactttcttctcccctctatcacctcgctgcacattccctgcaaaaaaaagaaaaaaaaattcctccagatgctctgcatttcttcaggagcaagacaagcaagcatccggtgttgttccttcctactagaaatattgtaatattgttacaactagcaggtaatgactaaaccaaatttgcaagaatttgatttggtgtgtcttcacaaatcaggaacacctaaaacaattttgtggtaacagtgctatatatggcttgaaatgaggacaaattagtaattaaagctttgtgcattttctcagtttctcaccaactgctttctcttttcgttttcatcttgataaagtttcttagacattcttttcttttttccactgtcctggacaagatcaaaagactcccatcactgacacaccttttatactttgcttgtcttctttgttggagcatcaaacataatataatcctgaaacacaggtctatatctcttgtgtactgcctttgtagatcaataaagctagataactgtaaagctaacggaataattcactctcctttctatatgcagaaattaaattaagctcatgaatatccatctctcttctttcttaactgttcacctcaagcttaggaacttgtccttcacaaaagcacctagctccatcgatctttcactttctcttcattatcctatcctaggctcctagcaaattgcttaagtagttaagcttatgaaatgtcgtgtcattgtctacgttaatgcatttttgtcccgctcctagctagcaaattgctcgaggcactatttgatttagttcgtagagttatagtaggagtacgtgagatgatcgatatgcacgaaaatacgatatatcattagcgtatgattaagcattaattaactattataaacttaaaaaatagatttattttactttttaaaaagaacatatctatatataaagtattgtttaaagaaaaatgtatcctttaacaaatcgataagtttgtacatgataaattgggagtagctcagtcaatgagctgaatcaaacggtatctataagtagttaattagttttatgaaacatcattatctacattaatgcatttttgtcgatagacatcaatccaatctctacaaattaatgccttaatgcgtacaaatgaatataatcgagattattgcgcgttggaggacagtgttgtgtgtctgtactaatagtagctgtttgacatgagtttgaagctggctaaacagtaatggcttgcagttgaggcgtcgacatcgtcacggcgatgcagttatgatcctcttgaacaattcctccactattcttgccgcgcaaaacgagcagattgatttatagactgatgacgagtacattttcaggatggatatatgtgaatggtgataaagttatcggagtatactttcatgtttgcttgaaagttcactataaattcagagctaggagagggtaccggatgcagttatctactcctatccatggtggctaagaattaaaatagagactcgcataattaattaagttgactttatcatcttacgttcctgttgtaaatttattaagtgtttattggcatgatgctgatgtatagtgcatgtgtatatgtgtacgtatgtatagcgcgtgcatatggagactttgttcaacagtgcgcatgtgaatgatctagcaactgtatatagctaatgtgcatgaattgatgtaggtcaaggacgatatacatatagatcggataaagaccctctattataacgtcactaccattaatcatcgtaataatgcggaacatctaattagtgatcatattgtttttttttgttaatgtgagaactcctgtactgagattgattacaggaagggattggaaggctagcttccgtttttaaacgaaaactgtaaatttttgaggtttcaacacggaacgaaagcacatcctgaagtgaaacttaaaatattttttgagagttcaaatttgcaacaatattaaaacaaaagagagatttggatgaagagacgtcccgaaatctcagggttgtaaccacacatcccttgccactgcacaaagtatatctccaaatttgcaacaataggtttgactaaagtttaatcaaattttggtgaaaatcataataccgctgggatcgatcaggatccagcacttgataatcaaaaatgtgatcactctggcgcgcttgtactacatgtgaagaagttggtgaaaaggcaatttgaatgaaggaatgtatgttgggtcggttggcgggtgcatgtgcagtggatcggagcaaacatcacacgagatagatgctcgttttgatggcgatgccaagttaataataatgcattgctagctagctcttgcggtcacacacgagataccatcggtggccacattgcctgtactcgagtgcagaaaacttgctagcttgccaacactattctcgatctgtcacggactcacgggagctctgtctgttactccacaatagttgaagggttatgtaattgttggtagaaaacattatagaaatttagaatagtactccctccatccctagatatttgacgtcgttgatgaccattcgtcctattaaaaacttttgtgaaatatgtaaaactatatgtatatataaaagtatatttaacaatgaattaaatgatagaaaaagaattaataattacttaaattttctgaataatattattcaaaaaatttatggtgcaccataaattcatccacaagaacatgctcttaattagcacaaactaggatgagtagccgaaatcttattaaggcatgtgaatatataattgttccattttactactacattcccacgtcaccgatcttttttttaatattttttataactttttaaatttttaacttcaataatgtatcattccaaaacttatttctaaaatgtgaacatgccacctgtagcggacgtgatagttttattatgtcgtgccagctagagtagcgtggtaagacaacgctgtcacaccaaccggacctacgtggccaaataacgctgccacgctagccggattagcgtggtagtattgttttgccatgtcagcctggttggcatgaccaaaagattcaaatcgtgaaaataagttttggtagtgtttatttttaaattaaaaattaaataaaaatctatgatgggttggaagtatatgaattaataattcaagatctaaccgcttagagcggtagggtgggagaaggagacgaaaggagaatcaaaatccaatctttttacggacagtgggagaagaggaaggagaaagggagaaatccctttgtgaagttttaggagattgtaggtgtacgttctaaacacaaattattcatatcacattcccaaaactataatttctctaaaaactctgtataacctttactcaactttttgttagctttatattatttgattttataacatttaatttatccatacgcacaattttcctctatctgtaatcaatcaaatcatcccattagaactttgaagttagaacatgcctgtacgtagggtttgaggtgatgtgtaagggtaaggaagagacaatcagtatagttcagtactaaccggcgtcccttcggttttaaatgggggggaagaacatacattgagcaacatacgtaccagctgaatagctgatggcggtgcaaccactaaaacaccgtacccatctctctctctctttctctctataaatttgacacaataaaaagaggggtcatcgttgggtgctcctcatttctctagtgatcttctttttcttttcttttgttttctgtctctagcgaactactagttcttggatccgatcgaccgaccctaccacccttgatttcatggagtgcatggcgagtactgaagagtctctcccagcttcttcctccatggatagttgcagcggcgaactgccgacgacgacgacgacggcgccggcgcaatccacggcgtcttccggctgccgaccgccggcgacggcggcgaagcggcggagtctgatcagcacagatcttcgcctcgggctcaccctctcctccgtcgtccacatcgacggcaacaacccttctaccccaaggcaagatttcgatctctgatcattctgcacacctactgctttaatttcagagaaattttaagatacttgagaaggtattcgatacatagtcgtaagaagtttgctttcggtcttttcggttttcgtttttttttcctcccttgttccctggcaatggccattcgaccggttgcatcgtgtaattgaaatcttgccttttctaatatattgacatgtaactcttttgcgcattcgtgaaaaaaagaaacatgttaaagaaattatctttatgtgaagataccaatttttataccatagaaattagaaaatgtgatatatgttaataacttaagcgattatcttggttgctactacctgttgatcgagcttgatcttaatttcttaggagttccctcacgacggcgacagtgacagctgatcgaggcggcggcggcggcggccatggacggcgacggtcactgttcgtgaaggtgtacatggagggcgtccccatcggcaggaagctggacctgctgccgctggacggctacaaaggtctcgtcgcacggctcgcctccatgttcagagcatccatcacctgtacgtaacattattcaggcattgatcgatttgtctatattgattgatcactaaactctgaaattgctgtggctaatttgctgttcatttgatcatatatgcaagatcatcattgccatcgacagttcgccgtcgtcgggatgaagacgaacaaggttcatcatgttctgacatacgaagaccaggagggagactggatgatggctggagacgtgccatgggagtatggcaagctagctcagctctgaccacctaattttatatttatttagactgattatatgattaaattgcatgagttttcaaaacaacgaaacactgatatatttgtctttttttcttctttattaattctcaaattatatcttttgaactaattatggattctccttaatctttttttttttttggatgaggcaggctgttcctgacaagcgtgaagagattgaggattgcaagagcggatgacaagtactgctatagctgttgaataattggttaaccaggatggtcaattaattcttccagagttcttggatttcattcattcttactttgctcattttggtggagcaatttagatttgagatgattgttttcgggagcgaaaatttactagtaaaagcatagtgatattgagcagaggatattgtacaaaatatattgtacacactagtaaaagaaaagaaacatatatatagaaataccattttacttctcagtctagaataatttattccgaactggcaattttactgtatgaaaaataattttctccggttgcacatgttttagttgggaatacgcgagacacacatttttttttattaagaggaataaatgtatttacatagtgggcctaaaaaataaaaagaagggacatggtacaggagaggggaaaagaaaagcataagcctaatctcccgaatgattcggcgacccaagaacaagcgaagggactttcatggtcggtatggctgatctagccatccgccggaggtccgcttctcacatcatagccctagctatctccatccaaggtctgctcttctggttgaagacccgattgtttctttccttccagattgtccacgctaccagtgtcgcaattgtgtcaaaccctcggcgatgatccttaatcatccttttgggactgtcataggcatgaaaagactgctcgttgagaggtagacattcggaatgaccgatagcactaagagcaatccaccaaagctgccgggacttcgggcatgcgaccaggagatgatcaatcatttcgtcgcattgatcgcagagggggcaacgatccgggtgtgacaggcctcggcttcgaaggcggtccgccgtccagcatcgcttgagagcgaccagccagaggaagtagcggcattgaggaggggcgaaagacttccagattggcttgtgctggaattgagttctccccaagaagagaatacgataagccgagcgggaggagtactgccctgagttctcccaacgccaagaaagcttgtccggctcatcagacagctgcactgatcgaaggtgctcccaaagcttgaagtattcaaggatcgcttgcatccccaacgccaaagagatatcgcgaatccatctcctatcgtgcagcgccttagacatcgtgcgtttgccctgcaaccgccctgggacagccgcctaaacagccggtgccagcgaccgaattgaagtgccctgcagccaacaatcttcccagaacaacaccgagttctcgtctcccaccgaacatgttttactcacttgagtgcgtgcattaataaagttgccacaattttaagcacatcatgcaacaaaaatcgctataattttattgtcttaagagtttggaacgaaaattggagttccggccaaaatggcccttatatttttttctattaataatagatcagtaattattatatatcagctcatgtgacccgttggccccagcacaaggagacccatgtaagtctacaatgtttatgcagggcgaggtaagctcttttgtatttaaacccctaatccggaccgctaaaaaatgcagttaggttctcaggacaagatagtaattagaagaggaattttacaatacttgagaaagtttcttaaggtatctaaattttacattaaaatttttggtaccttacttagtacttagaggtaacaaattttacactagaaaatatgatacttctaggtacattctcaagaatgataaaattggtgtaatcagaaacatacttctctcaagtcacccaaaaaaagtacctatatgttactaactcagctcttcatcggaaaaaaaaaattcgcaaaaagaatataaccgtgaagaaacaaacagtgatccctagaacttatgacagtccagatatcactctctcacacttctcctcaaggatcctcacggcttctgtgaagagtgcctctggcggtagccctccagtagactcgattgtaactagccaggggaaacaatagccaaaattatagtgagttgaacaagacaactagcctgatgcaactacaaattgtacaggtgtcaaattcaagaaaggagtagtataataacaaataattaggtttgtccactacttctgacgcgccgtagttctacttgttccccgctaggtcccataacacattccctacaaagggtgcatgctcttggcctagcaacaactgctctcttttcccctgcgtatggaaagatagggggtgatattgaagtaaaggcggcgaccatagcttgaattatatgagtttgaaggctaaaaccatattatgttacctacggtttttgatctttttagtgcttagtaccctcaattttggcagtttcgtaaaaagttcagaacacataatcctatgaattttctttggacatgatgtttgtttccttgcttttattgtttgaacgatttaaaactcagaatactgccaattatattcacttctactgaagggttatttcgaaagagcaggcctaaaaacctacatcatattgcttaagaaaattttaggaattgagggtctacaaggtgttcatttaggtaagagcttgttacatttatcatacgctcttaacgtgcatatttgaaacatgtttacataaataaaatgtgtttatcatgttgcagtaacaactggtattatgagtagaattccttaataaagtgtccatcaaacacattaaagtgaccacaagtatagaaaagtcaggaaatagatgacaatatgaagtgataagcgtatagcaaatcgtcacaatagacaaggtgatttgtgttttattattatgaaaaaaaatcccattatccccttatcctcctatgagcacctgcatttcaatcgcactgggaaaagaatactataaaagcaagagatatactcatatatatgttacaaacaacacacccactttttctcacttctatagtaactagtgctatgctcgtgcagattgggagggatacagatgaatggttttatggggttcaattttatctatttggtttttctagtgggttgattttctcgtgaaaacactgcttcttgggtgggatggtttttaggttttttttcccttacgtgatggggtaagtacaatggtgggggaggaggatgagtccgcttttataccatagtaaagaaataagtgcaacaacaattaggattgacaataactcccttacttagtataacaacagtaaaataagtaaacaactaatggaaacagaagttaccgtttcccaggtcttcaatatcaaaaacattgaccgggcactttttcactagcttctctgcgttatcacctttgatttctttacggaaaacaacctatgttataatagaacactaatacatgaaggcaaaagcaaaacatggcaactcacgattttcttactagaaattcccacgaaagaatttacctcggggaacattctgtaccatgctgtagcaactggagaccacttggcatgcacttccccattcccttaacaccatgcacctcgagtacaatagcctaaaacatagctgatctatattagaaggtacattagtttgcaaagaatcacccccacaaaatataagtaaaacaatttcaaagtagcaggtctccataagaaagtgtctttagaaaagtttgtatcagcacgcacatgaacttaggcttggtgagtaattaagccaaaaaaaggattcatatatagctacatataacaagactccatgaattgactggattgaagtcttctctctatcatgtggactcaataaagcaccttagtccaaatagtaaatctaaaacaatagagaatatatagctaccaggtactcctgtcataatactatcatggaaaataaccacagtaacaaatttacctggcctggcccaagccttgcaatagttatatctttaaatttcacaccaagaggcttttctaagatatccttctggctttgactgaaggaagtgtaggtcttttgtttgtacctagattgagcaggagatgccaaaggtagtcggctgccttctggcaaccactctaaatcaccagacttcactgtgcataaaaaactatgtgaaaacttgatacggtagaagatatcaatcaacattctacgaaatacaatacaggcttgtgctgctcacaattatatagaagtacaacaagagaaataataacaaatacttaatttatcattggcatacattgttggctttaccaaagtaatttgttagatgactgattagactggtggaaagtctgattgatgtggcatcaaagtagtttaaatgatttagttgtctataagcttcatagcatatagtgtgatgtttcaaccagagaacaaaatggatacttcatttataagataggactctttgaaggtttactaacaggatcaaataaggttattgatattaatttatccgattgcaacttgcatgtgtagggatttcccatcaaatgagaagcatattatgtaattcaagacaaatttgtaaacatgatggtactaccttacttatttagtaacaatgagaaaaagccaaaaatatgacatttagttttgaaaagcaatgaataaaaatggctcagaagagtaaattggagcagatacacatcagaggggcaaaaatccgtatggtcgacttagtaagttggaaactgtaaaagagtctaggttgcagggaagtaatatatacctgtaagccgcggggaaccctttttacatgaaacatggagtttgtacacaatagtgtttctttcatttgggacatcattttctacaaaatacaacagaggaatagggcagctattattcgtgtataacaaccaatttatgaatatgaattacaataaattatgttactgacctgacatatattcaaaatgcctaggatctgcatcaagtggaataaggccaagcctatgtgatagaacttcatctgctataactgaggtgttgtcaaccattaatactttctcgattgccattgtaggaagctgaaaatttgagacaatgaagtacatgtattgaaacagaacccccaaatatatgacacatttacaaatttagaatacagcaaatagcttctaagatggcacagatgataacatgcgcaaacctctgctataaggattctccgaaaagcattagctattgatgcatcaataccaatcatatcaaactccatatcatcttccgtaagtcgacttatctcaactttgaagtttttgcaaaatttctccgctgacacgctattatcaattcccatagcagaataagcaccagcgtattgaaaaccttcagtctttaaacatataaaacaatagattaggcctattgtacacacactgaaattgcaataaacagaatgtttcctttcaaacagagtattaaaaaaaatcatgaaataatacccattctatctaataatcttaaaattaacccattaggtgcagtacggtagtagaaaaaaaatactaatgcttaggctccttcacaagaacaacttatcagaatttctgaacacatgatctctgaaggatcgaatttaacaaacaaagatagaaagagttggaatgagagatacattaacgggggcgtcggccttgcagacaacacgcgtgcgctggacctcaaggtgttccggaagcttcttttcctgctgcttgggctcgtgatcgtcgtccgtgtccttgctcgatttgctccccatcttcccctcgccttcccgtgttaccaaggaggagaaggagaaaattagccggcgaggagtcgcgtggcgcgggcactagctagctagggcaacgagctgccgctgctgctacacgcgggcggcggtggcggccggaacgccggagttcgcgccgtgatgatggatgtcatttgggctctaatgggcttaggtctcggattttgggccatgatgggctttttattttggggcctccagtgaatgggcctcagcccttcacgctttaggaagccctcatctcagaaaaaaaaaagaagaaaagaaaaaaaaaaggaatccgagcagccacgtcgccggcgacgccgcccgccctgaccgacgacgaaccggccgccgcccggcgagggagatgaagacggtgagcctcggcgccgccaggccttcgtctgtcaagttccgcatgtacgtcgtctccccctctcccctgcccctctctcggcagcgttgcttctgcatctccacctcctgacctccgccgcctgcgcggccgcgccgcaggccgacgagggataacctggtgccgatacgcgtcgacgtcgaggtggacggccagcgctacagggacgccttcacctggaacccatgcggtatcgcctcctcctcctcctcctcctctgggttggttgcttgctgcctcgtctgctccgatccaaatcttcctcttcctctgttgcgctggtgcagaccccgactcggagatcataagcttcgcgaagaggacggccaaggacctcaagctgccggccaacttcgtcccccagatgctccactccatccaggtgcccccctttggattccatcctaagatgaatgtttcatacagggtgtcctgcaaatcttgcaagattgtattcatatgtgttctttgtgtgtttctaacaggggcaactgaccgagttccgttcctacgagggagaggagatgcagatcagggagaagattgtgcccctcaaggtttgccttctcttgctaaccgcagattgtcttttgtaccttttgtttcaaccatatgaattggagtggtgatgaatgtgcagattgacctccggataaacaatactgtaatcagagatcagttcttgtgggtaagtgtgcatctgtacatttcaggattcttgtgtttatttggaagattttccattatcgagttgttcgaatatgttgtttacttaactttctgtcttcacgccaatttttgaattgcaggatataggcaacctggatagtgatcctgaggaatttgcaaggacgctatgtgacgatttgaacattacagatcctgaagttggggtatgctttgaaattctgaattcctgatgaattatgttttcctttttgacacagtttattcatttgaagtatcatgtctgagaaggttggttccttgtcacttggataatttttttttaaaaaaactaatttgtaactgagtttgaatgagggaatgaccgtgtcctaccgagcatgtatgtgaaagaaaaacctcatgttggcctgtcctcttcattttgaatcattggggttatgttgcacacttgtcttttagtggtaattttggctcggtgtatatgccatcaacctatagttttatgtgctattaacttgaaactcttgtttaaacctacttgcaactaatgacaaaagagctctttcaattattgctgctattggacccaactctactattcgacttttgtaagtatggtaaaatcttgtagtgccattatattccattggattttgaagtggcaaagctttgagtgcttgtgattctttgcatagtttcttgctggtgatgttttcctgtaaacacataattttattatttctgcaactttgttttggattgacaaagtattgtgattgatgtgcagcctgcaatagctgtctccatccgcgagcagctttatgaggttagctatactgcccttgctatttgagtttgcaaaaaattggctgtaattgctttacacgtttatggttaccctcttattcggtaagatcgttgttgatacgaaaaaaacagtaatatttgtctttgcagattgctagtcaaagtgtttctgctatgagggaagcagctagagtttcaaagaaggggaggcgagcaccagaatttgcttcaaataggtctgtgcaagtgtctagtgttatttaagtttcaatggaactgtgcgacaaatgaatattcaagctacactctatcctttttggtatatttcaaatttctgtgaccatgtttttgcagtaaagccatgaacaattcactagatctattcaagtattttggcagcaaagggagtgtcgttcggtaagctctgctgttacagaagcttttgatatgttaattaatgcttatatgttcgcctgtatgagggatcagatccattgttccccatcaataagcgacgaaggcaaagaattttcgcagctttatccattgtttaattgtggagtatcatttatcatgattactactatttggtcttaacttaagttgctcttgtatttcctctgtaacaggaaaaggaaggaatggtacttgtatgagcctgttgtagatgtcataactaatgaggaagttggagtaactgatgcaacagaggagattaactccaggtgaggaatgatcacatataatcagtgaactccatttattgttctagatgtgactgagccattatttgtgggcttccctcttgacttggagctgcaaccgaaaacaattgtggccaggaatgcatgagctgaagctgtaaactgtaccgcatttgatgatcctgacgtgttgaaaagaaggatgagagcctccaacccatgttacaccaatgctgtttgcaaagctttctggttgtgactgcagacctcaggaaagaagccatttcaatgtttgtgtttggaagggagggcgagcattaggagcattaggtacctggctaggttagctctgttctgtagatgtgtaatgtgttgtactcataaaaaaactgcatggaagccatggaatgtgacctacctgtatggagcttgcccttcagtttgctattgtgtcgaccatgttttgggcttgtgatgtgtttatgttttggaagaagtgttttttaggtcgtcagagtttaggcctactaattaagccttggacttttcgcatctctcatggattaagtatggattgattgttgatactcctatgtcaatcaattggatcagaatatgtatttgtatgattcccatccaaatgtggatatagaattcatagacctgggctacggaataccctgtttatggcgtgtggggatattcagataatccgtaaatcagatatatttcgtctaaaaaattgcaaatcggatattgtagtcagattggttggaatttggagagcctactcctggcccgtcatcttttcttcatccttttttttaatccaaacaaagtgatcaatttattatatattattataatataataacaattctataaaaaaggagttgattatccaaaaatatatataaggggttgaatctgtgtaattgaaagcgcttgtaacgatggtcaatgaatctactaatattgtacaacattttataaaagagaaaaatccaacaaatatttgagacaacgcatcaccgctttcaaggttagactagtatttccactcagaaaacgttgccagatggagtgacagccaactgatcaaatccactatcaacaaagaaggcccacccggggcccagaccataatagataacaatgccagctcagacatcagctgcacaccacctctaggagctagtacaataacatactacaaataaactatatacacatgtgaagaagataaaaagaaaagagagaagaaaagcgggctacagatttgtagtcagctatagcatggactttaaaatattatgtgtatggacttcaaaatattatgtgtgtataagatatgagaccatatattaattatttagtatatatttataggtaactattgtatgaatgagctatcaaattactacctccgtcccaaaatataataatttttagctataaatctcgacacatagttatagaggatttgtagctaatagttagctatactattaaacttcctctaggacacattgatgtggcacactgggtccaaaagactagtcattgccaagaaaggcaaaaggcacattagcccataacggcatgaacaatgttgtcatctgcaaggttgtgctggcctgctgggttagttgtagttttggattatatattgattcagggcaattttaaagtttgatttttacgaaaaattttaagtagatattcacctatgttgttggctatcagcctatcaccaaaatggagctagacgataaaagtgaagaatagaaccactaaaattaattctaagattaaattcaaaacaaactttagagattaacgcccaaagcacaattaaacacagcctaaactttgttgggctttctaaaaaaagccggatcactctggtgatatgttttataaaatgaaaaacacagtctaaacttttctgttttagtagtggatgtatgtatccatcccttagaatatatcatgggggaaaggaaactctcgttcttctacatccagttagaacgaaggagggttcactccctaacttgtcaaaaattaccatatctcatattttagacaagtttgatcaaatcaactcattgtttggtttatgattacacttgtggcaagattctcttatttctcatggtcccacatgtcatcaactcaaaaaagtgtggcacatctttttttctagctaaagtgtgacttatttttttattgaccacaactaaggtaaaatgtggcaaaaaagtatgataaatgatgacaatattagtacagcatccaaaaaaccttataccagaactaagttttgttcctgcaaaatttcttctaaaattctcctttcctggtgaggactcaacttgaccctaccaattagaccgaatcagttttcctacatactaacctccatctcaaatatagctactaagcttataacataagttgttatattttaaaatgaaggtagtacttttataatgtcattggcatttttttttactttcgttgaatataaagatagtttagctagcctttaccattgtagagatgaaaattactataatggagcaggtataatagatcacgtttgttagctactacctccgtcccataaaaccggacgtttaaaggttctaccaatgtcccataaaacatgtcgtttgagcaatttaatggccatctgttttgaatttttgaatgtgctcatgattgctttgccacgtgtatttttgtggtcatagcttcagtgtgcagagatatataagtattcctactgaatgccctgcactcaatgaaatgacatctgattattattaagtgagggcaacttggttatttttccttccagctaatttgcttttgaaaccttaaagcgtcatgttttgtgggacggaggaagtagctattagcctagctataccagtacaatcaaatgtggaagaaatagaaaaggaaaggaagtataaagtgagctattaacttagccatgtcagtacaatcaaatgcaaccgccgtaccttggcagccaccaagggcaaaggaggcctgcatcggcggagtagccaaccacatgccagacgcgtaggatgctggcaaagcttgaggcggcgggccgggcaacttcctgtttcgatcgacccatggtataacaagattgtgttggctgattggtattgggagaaggtatttggagtaagaacaagaggattttgtgctttgaggatctgatttgatatgtaatatgtgatttttttcccccacagtgggggatttaccgctaaaccctagcatttttttatagggacgagaaagatcgcacacgggatgcaaaaggcccacaaaacgtgtggtctatggacagtatcggctggtatacaggctccatgtttgctttatgcatcttgttgctcggccgggccgccgattgcatgagcgcccgcttcattctctctcttcctttgtatctcatccagctcagattgtgatgacatgtatgggctaatagaaggctgattagcccttattatacttgccctaatctacagctggctctggaagggcttcaagatagatgcagtgcagctgccaacttaaaaagatacaaatgtggaacctcacatagattaaattaagttagaagagcctatctattgtatcagttatctcttgagttgattgtaggtgatttgaaaaagaaatcgaagatattggtagattatattattagatttactcttatcaccaccaggtcaagagacggttaagggaaaggcaggcttggctcgtgttgcagatggcctaaagagtggtgttgactacttgactggtggcgcaaatcagtgacgatggttacacataagcgaaatgacatcatgcttcatgaccttccagttgcatcccttcgatctttagctgcaggctcccatgatttccgagagagggactagctacctatttgtcgacagatttttgggtcaaaatcacccagattttggccacccttggatcaccatctaagggacaaaaaaacatgcaggaaaaatgaacttttctcactgggccagaatccaaaacaacaaaacaacacatatataaaaaactagcccaaaataaaaataaaaaacccaatcaaaatagaaaaaataagaacaaagcccaaaactaaaagttgtcagcccaatatgaagaaatcacttttggcagaaaaagcaacttttagcagtccaagtacagtccaacccattacgatggacttggcatccaagaaagctcaccaaaaaaaaaaagacagatcatgcacaggtcaacgcatccccagatcgatcccaaccaaatcaagcacgccatggacagcgacgagaaagagaaaaagaaaaacaagcagattatcaccgagaagatggagatcaacaggttgaattcaaccaaaaccaatctaccaggtaaatatatacctacctcaactccctctatagctttttggtactgatttctgccataattaaccttcaaaatcaacaagaacaactcagatctcaaaatcttggagaaaacacaatagaacagcgaatttctttagataatgcagtagtgagtatgtaagtttgggcaacaaatcaatcatacaaaagcatatatgctgtacaaacacacaagacacatacttatgaatttagaaaaaccatatatgctaaatgtcatagctccaataatcaacctcatgtttttgaactgatagcacagtacctggaacacttgaacattcagcctcatgtttttgaactgatagcacagtacctggaaaatataaaaagaagaacaaaaatggcacaatcaggtatgcaatgaactaaagttacagtatagcagtaccaaagttacaaatgtaactaaggcacaaatcgactgtaactgcattgtaattagtgaatgattgcactgtaagtggtgtaagtggagacaacaactagaaaaaaaagggcctacatctacacttataattttttgtatgatgctaccaggcttacatgctttctaatgtttttccaacacattttgcaggactagtatctgaacgtgaaagtttgaagaataccaattggcagaacaaggaaactatgaagaaagagcaatcaggtacagtatccactagttcaatctccaggggatgtatccaaccacactagtagcactctgaatttgacaagattaagtttatactttacatatcacattttagtaaccccttcaaaaatcaacctagcataaaaactcaaacaaaagaatcagtaggaactaaacacttgtagcccccaacaagaaaaatttcagagtagagtttatagagataaatacaaaagtaacttgcagtcaagttgccatgtaactgaactaaaaggatgattttgaatggacattttttgcaatgatttgaaccatattttgcaggaataaaatcagatgggcaaaccaagaaggatatgaacttgcaaaacctagaaaatataaaaagaagaacaaaaatggcacaatcaggtatgcaatgaactaaagttacagtatagaagtactaaagttacaaatgtaactaaggcacaaatcgactgtaactgcactgtaattagtgaatgattgcactgtaagtggtgtaagtggagacaacaactagaaaaaaaagggcctacatctacacttataattttctgtatgatgctgccaggtatacatgctttctaatatttttccaacacattttgcaggactagtatctgaaagtgaaagtttgaagaataccaattggcagaacaaggaagctatgaagaaagagcaatcaggtacagtatccactagttcaatctccaggggatgtatccaaccacactagtagcactctgaatttgacaagattaagtttatactttacatatcacattttagtaaccccttcaaaaatcaaccaagcatgcaaactcaaacaaaagaatcagcaggaactaaacacttgtagcccccaacaagaaaaatttcagagtagagtttatagagataaatacaaaagtaacttgcagtcaagttgccatgtaactgaactaaaaggatgattttgaatggacattttttgcaatgatttgaaccatattttgcaggaataaaatcagatgggcaaaccaagaaggatatgaacttgcaaaacctagaaaatataaaaagaagaacaaaaatggcacaatcaagtatgcaatgttacagtatagcagtactaaagttacaaatgtaactaaggcacaaatcgactgtaactgcactgtaattagtgaatgattgcactgtaagtggtgtaagtggagacaagaactagaaaaaaaaagggcctacatctacacttataattttctgtatgatgctgccaggtatacatgctttctaatatttttccaacacattttgcaagactagtatctgaaagtgaaagtttgaagaataccaattggcagaacaaggaaactatgaagaaagagcaatcaggtacagtatccactagttcaatctccaggggatgtatccaaccacactagtagcactctgaatttgacaagattaagtttatactttacatatcacattttagtaaccccttcaaaaatcaacctagcatgcaaactcaaacaaaagaatcagtaggaactaaacacttgtagcccccaacaagaaaaatttcagagtagagtttctagagataaatacaaaagtaacttgcagtcaagttgccatgtaactgaactagaaaggaataatttgatataggatgattttgaatggacattttttgcaatgatttgaaccatattttgcaggaataaaatcatatgggcaaaacaagaaggatatgaacttgcaaaacctagaaaatataaaaagaagaacaaaaatggcacaatcaagtatgcaatgaactaaagttacagtatagcaataccaaagttacaaatgtaactaaggcacaaatcgactgtaactgcactgtaattattgaagtattgcattgtaaatggtgtaattggagaaaaggactagaaaataacatggctacatcaatacttataattttctatttttctgtagaaaagaaaggtatctatttttctgtagacacttcttcttttgaagtgtctatttttttattcatacaactcctcaatacttttttctggtccaccctgcataatttagtatttataatacttagcaattatataatactagtatattatgatatcatgatattctaaattagtttgaaaatatcacctcagtccatgtcaccatgttgctgttgttgtataacctatcaaattcttcatagctccagtgttctgtcgatatctgttcttcatacaatctatcatgttgatgtgactcttgaggagaaaacctgcttgttgccaaaatcatggaattctatagtgtaaaaataaaaactgttagcattgcctttcaatataaatttttcaaatttgtttagcctctattgttgaaaagtatttgctcacggtaaatgctactggtgtctgtagcagatttgtatatctctctactcgttcctgcaattttgaaagtggttagtaatctgttcatttttctgtttgcagggacaaatgtttttttactgaatatgcttacttcatttgcttgcaagctgacacgtggactttgaattatctgttgcatgaggttagtgtagctcatttgtcctccctaaacctgttttatttaattacatttattcgtcaaagaaataaatatattcttcatttttgtaaagcatgattgtacttactagtctttcattttcattaagaaatgtgtattgatcataaagtagttgtgctttattttcgcacatctctgatccaattgtccctgactttttgcatttttcaaaatcctgcaggtaatgagatcctggaattgaaaaagaaagcatcattagtcaaaatcagtgtaagtactgcaaaaattcacctctaatttttgaggcatactaatgcattatccatagcctctaattcttcatatgatgttttttgcttaatgtatttgacttatattccagttacagtccatatgcaccataattatagttgtaacttctgttatttctcactgtaactgaatataggtagttagattattttttttatcatgcttcacctctaatttttgccttatataaatttgtgttatctgggtgataatgtgtttgcatgctgcatgttcagatgctcctctatttctttttaaaagaagatgttagttctagctaggaatgcctcatatttgcttaagatctttgtttctgtttttagaatgaatattttaagtgcagccaagttttttttgtacaaacctagtactactgaataaagattaattatacaaatgtagtttttgattactattgactgctagtactagaccggactgcatctacatgctatattctaaatctgatttgattccagtcacagtccagttacagtccatatgcactgcaattacatttgtaatttcttttgtttctcactgtaactgaatatacagttgtaatttttttggtaaattatcactgtaattttttgtcatgcttcatgactaatttttcacatacataaatttttgctagatgaaattttctatgaagatcagatatgatgcacaataataggcaagcatgattttctaaccttcaactgtcttctttcttcttaattcttcagttctatttcctgttacttgagactttgttctatcagcccctacatgtaatttaatttaaatcaagtatttgttggtgcatgtaatagaaatattttagagtagcatgttagttttatatgttctaggtaatctgactacctaacttaaatatttttgggtttcatgtaatctgaaaatacagtgattctaacttaaaacatacttacagtacaactcatcaccacttacagtccagttacagtgaaattatacctcagttacagttgtaatttctgttatctctcactgtaagtgactgttggtagttagattttgtaactgattgaccttgggtttattactgatttgtgtgaaaactaggacacttgtagtttgggaaccctagtgactctttttttgtaagttgtgcatgcaaaagttacactaaaattcaacaccacttaccctgagttacagttgtacctgattgctctttcttcatagtttcattgttctgcaaattggcattcttcaaactttcactatcagatactagccctgcaaaatatgttggaaaaacattagaaagcatgtatgcctggcaacatcgtacagaaaattataagtattgatgtagccatgttattttctagtccttttctccaattacaccacttacaatgcaatccttcaataattacagtgcagttacagtcgatttgtgccttagttacatttgtaactttggtactgctatactgtaactttagttcattgcatacttgattgtgccatttttgttcttctttttatattttctaggttttgcaagttcatatccttcttgttttgcccatctgattttattcctgcaaaatatggttcaaatcattgcaaaaaatgtccattcaaaatcatcctatatcaaattattcctttctagttcagttacatggcaacttgactgcaagttacttttgtatttatctctagaaactctactctgaaatttttcttgttgggggctacaagtgtttagttcctactgattcttttgtttgagtttgcatgctaggttgatttttgaaggggttactaaaatgtgatatgtaaagtataaacttaatcttgtcaaattcagagtgctactagtgtggttggatacatcccctggagattgaactagtggatactgtacctgattgctctttcttcatagtttccttgttctgccaattggtattcttcaaactttcactttcagatactagtcttgcaaaatgtgttggaaaaatattagaaagcatgtatacctggcagcatcatacagaaaattataagtgtagatgtaggccctttttttttctagttcttgtctccacttacaccacttacagtgcaatcattcactaattacagtgcagttacagtcgatttgtgccttagttacatttgtaactttagtactgctatactgtaactttagttcattgcatacctgattgtgccatttttgttcttctttttatattttctaggttttgcaagttcatatccttcttgttttgcccatctgattttattcctgcaaaatatggttcaaatcattgcaaaaaatgtccattcaaaatcatccttttagttcagttacatggcaacttgactgcaagttacttttgtatttatctctataaactctactttgaaatttttcttgttgggggctacaagtgtttagttcctactgattcttttgtttgagtttgcatgctaggttgatttttgaaggggttactaaaatgtgatatgtaaagtataaacttaatcttgtcaaattcagagtgctactagtgtggttggatacatcccctggagattgaactagtggatactgtacctgattgctctttcttcatagtttccttgttctgccaattggtattcttcaaactttcacgttcagatactagtcctgcaaaatgtgttggaaaaacattagaaagcatgtaagcctggtagcatcatacaaaaaattataagtgtagatgtaggcccttttttttctagttgttgtctccacttacaccacttacagtgcaatcattcactaattacagtgcagttacagtcgatttgtgccttagttacatttgtaactttggtactgctatactgtaactttagttcattgcatacatgattgtgccatttttgttcttctttttatattttccaggtactgtgctatcagttcaaaaacatggggctgaatgttcaagtgttccaggtactgtgctatcagttcaaaaacatgaggttgattattggagctatgatatttagcatatatggtttttctaaattcataagtatgtgtcttgtgtgtttgtacagcatatatgcttttgtatgattgatttgttgcccaaacttacatactcactactgcattatctaaagaaattcgctgttctattgtgttttctccaagattttgagatctgagttgttcttgttgattttgaaggttaattatggcagaaatcagtaccaaaaagctatagagggagttgaggtaggtatatatttacctggtagattggttttggttgaattcaacctattgatctccatcttctcggtgataatctgcttgtttttctttttctctttctcgtcgctgtccatggcgtgcttgatttgggttgggatcgatctggggatgcgttgacatgtgcgtgatctgtctttttttttggtgagctttcttggatgccaagtccatcgtaatgggttggattgtacttggactgctaaaagttgttttttctgccaaaagtgatttcttcatattgggctgacaacttttagttttgggctttgttcttattttttctattttgattggtttttttatttttattttcggctagttttttatagactgttgttttgttgttttggattctggcccagtgagaaaagttcatttttcctgcatgtttttttgtcccttagatggtgatccaagggtggccaaaatctgggtgattttgacccaaaaatctgtcgacaaataggtagctagtcccagtcttatatatgacatttttgatgagatacataaaagcatggtgtgttggtttaacaatgatgagaatcggtaacaaagaagactgcgtgataagggcaagtagctttccagctacacaaagacaagttcaagttgccattagccacagaaggtgaagacaccaaacatgttttattttcaaggttgaatttaaaatataacaacaaaacaaacataacagttttttttccatttttttaaaaaaggggacacatatgctaattatgtacaccctcattttataaaaatataagtacttttactttctctgacccaaaatataacatcttccatagctcaaattttatcatgaatataacaacataatacttgtaaaatatgattttaccactaaactatccatactatcatttgctattatagtctcaatgcaacaagtccggacatatatctcatccaccccaacaatgcaaccaagtttttctttttaccaccatttccttaacaccctataccgaatgctaaaacttattgcattttgggataggtggaatagagtttttttaaaagatgattaaggatatatgtgaaattaaatgaggatggtggtgctagattaagatgagaaattagatgaaaaaaaatcaaagagataaaattatgattggttaagatgagagaataggtgaagaacttttaagacaaattaaatcctgtaagtagcaatatttagaatagatggagtagataacatatattatatccttggggacaaatttatctccctttcctccgtctctctcaacatctatatttccgatgatccgatctacttagaaattcttaggattaatcgataagacgcccaaacgaagcaatcggtatcatatgtacaatgattaaatactattacatcagaataagaccatatacacgacggatcacggatgcttttccgccaaagcaggatattccacatcaacatgtccaaggtgtcttgtgctaagcactagtgtttctcgattcttttctactgtgccttcaagtaaccgaaggggcacagttgcactgatgcagattgcagagtgatgcaccatccaagctgacacaacacacaagcagcaacatgtggcatgccaaagaacatattccacgcgagaaccgaccggccgagaacgacggcatcgaggcgtacctttcactgttcacacgggaatcgcaccatgaccgaaccgtggaacagcgacccggctggtagcatggtaggtgtggctaatgaaccagcttgactccgacttgttaaatctatagatctaaaaagcttaggtgttgggtttgatttttcgtgggaatgaatttttcgggacttaatggttttatgctttcagtggtaatcgacgtacccgtcaacaacgaggtgtctctggtgactttgtcaatctccagaataaatttgtcggcccagtcttcgaagatgctcataggggtacagtttgcgtgcgtgcgttcataggggtgagtgtgcgtgcattgtgagtgtctgcgttgtagtgtgtaattcttaaaaaaaaaaccttagcttgctagctacttctaccgtctaaaaatataaaaactagaacttgatggggcatgtccagcttcgtagtattaggaaatgtctcatccgatactacgttcttatattttgggatataggctaccaatccagatttgtagcactaggaaatgtcccatccgattctaggttcttatattttgggacggaaggagtagctcattagatccgtcaacaagatttaccgcatttgcatcgtctttgtagtttttttttgttttttttagagatggatattttttttacccggcctctatatccaatcggatatatgcaacctttttaaattaggaacttagcttatcaagcgggtgctactcaggtcactgcaatcactaggctatatgccctttcacatgtagttttaaagtttatcaatttttaatttgaatatttatcagtttattttatgttaacataatagcaaacactaattagtaaagaagccactagataaaaatagtacataaataattaaagtactaagtcctagttaaaaggctccgtccaaataagataactactcctatagtttaaattgatataaggaggagctcataagctgactcattacgctcgggaactaacagcttagctcgacttcactcgttaagtcgttattatggcttcaagttcggactgagctcaatgcaagacgatgacgatccatgccaataattttgagtgtttttttcttttcacccctgccgactagccggcgacctttctccctctgatttgcacagaagcaacaacagtacagtaaggacggtatgatacgtaccgtaccggagtgcagccgactggtgcagtactactgccactggagtagtacgtacactccaccagtgtaccgctggtagcgtggacagataatgcacaagtattttttttttttgcttttttataccatccgtcctcatttatgcgcttatgtgcctaacgtttaatcattcatttcattttaaaaatttataaaaaaattaaaaaataagtcatgcaggagtattcttcatgttttatcatctaataataataaaaatgcccatcataaaaagtttaaataagacaaacgattaaacactagacatcgaaactcatagataaatttattttgggacggatggtgtgctcccaccatcctataaaaagcaaatcttgacatatatgtgtccagatctatagtattagaatatctcatattcggtactagtactaatctgttttttatgggacagggagtatgtatctatcacagtgtcaacgtgtcatttcattttcgcggccttggaaatcggtggcactactgacctggatgatggttgtcatgacaacaacagacaggctcacacacgcagtcacagtgtcacgcgacttcctggccttgctagctctaggaattagctctaggaaataggaatgtgttgtactagtacggtgtgctgcgacgtataccggtatacgtgaaaaacgtgcatccgctccgttttttttcttgtgccggatcaacgagcgcgacggccagtacggaacgcatagtgagcagcagcggtaaaaaggttggcttttggctggtccttttttttttctttttctgtttcatttcctggtttgaaaaccatgctatgaaaatagagaaaaaagtgtagataataataaagttattaggcagaaaaccactagaatatagtcaccgagaaacaatacgtgtggcatagcttgtgaaaatcttgagatttgtttgtgaggttaggagagtttaaattactagttgcccctagcttttgttaactcgaatcagtttttcatatatctttacatgaatttaatggcccgtttagtatatttacaattcctaaatttagtttcaggagttaaatctgaagtgaagttatggagttgcctaaacccagctttacctctctaatttattttttgagaatgctccacccaactctacttctattttaaatagagattaaactgtttggctgagttccagctcccgagagatggagttggagctgaaactgtgtaaaacaggttctaagttgagacatacacaccggtgcgtgttcatgttggtacacgacaagaacacagtaaatgttgccaacagtcttcgaattttaggcagtttgcacgccaggatggacgatgaaaattaaacggtgaacagtcaaaattgcaatccacttggaaaccggcgattagttgccactggctagtcctggcaggaggtgggctccacccactggaccccaaaaaggacacttgctcccccttgtgttgattcctcctggatatgcttcagttcagcttaggggtatttttgccaacagataatttgcaggaacgctactactaccttcagataatttgcagataattttaacctatcataggctcatggtagtaagaatcttccaatgacagctggatgcaatgaacaagctaggattgatactacctacgtaataagtgcagctgtggatatccgtgtccaacctttaaccatccatcttatttgaaaaaattatgaaaaaattaaaaaaaaattagtcacatataaagtactattcatgttttattatctaatagcaataaaaatactaatcataaaaagtttctaataagacaaacggtcaaacgttaaacgtgaatagtgcaaaactgcacttattttgggacggagggagtaactcataagcccaaacaaaacaacattaactatgacatcaatttatcagtaaattttttatatagaaacaattgctcatttgaccatatttcagaacctaagtatcaaattgacattattttttctagtttacttatttgaccctttttaaaaaaataaagtgaccttatatatttcctctgtttcacaatgtaagtcattctaccatttcccacattcatatggatgttaatgaatctatatggatatatgtctagattcattaatatcaatatgaatgtggaaaatgctagaatgacttacattatgaaacggagggagtaatatgttttgtcggtttaaaagttaggggttaaaaatagattgtgatgaaaaatcttccaaaattaactctaaactttaacttttgtactagcggtaagctaacaactactcacgccgtttcatgttataagtcgttttgatttttttctaatcaattttttttaagtttgatcaagttaatagaaaaaatctagcaacatctagaacactaaattggtttaattaaatatatttcaataatatattataatatatttgttttgtattaaaatgctattttgtttctctataattttggtcaaatttaaagaaaattggctaaaaaaatcaaaacaagttataatatgaaaggagaggagtagataatagatgccataattgttttgcgacgccgttccatattattgtttatgaagttaatcaaaaaccagtccggttaaaattgttcatactgcttgaagaatcttgcagcgacagttaaaataatgtaaaaccgttctttacgtagccctttttgatgacactacattctatcatttcgttaaaaaatgcatatattgccttcaaatagaagataatatttcacacttagcatatttttcaaggagcgttgcacgtctaacctttagagactgatggagtgatggtattctccaaactttgttcatccttctaaaagcgcgcgacttgtaccgtatcagcgatctttgtatattttataaaaaaacagtacaaatgcaggcattcataacgcacgtgcataccctatccttatgagcatatctgaaagactgagtctaagtcaccatggacacctcgctgtcgatacatatattacctagatgaatgcacacacgctatgagcacctctgaaagaataaatcggtatatcttgagattgataactcaccacggacgcaacggatgtgtcacctaccactgaaaggataagtagccgtaaatatgaacacccatattaaatctagaatttaaacttgaatgaactggtttaaaaaaatctaaccagttaaattatactcacttcgcgtatcaacgaccttttggattcaactgttcgagtaccatgtatattggtgacttttcatgttctactgtttgagagaccaatttgatggttgctctatccttttcagataaacaactgcacatggttagcgagtctcgataatatgtttgttttttgtttgcgtcagaagtaatcacaaaatgtaaattccaaggtaggagtaataaatgttataccgtcctgtcttcttctttcttttgctttgaagaaaatttttttttgaaacttgctttcaataattttttttatcatcaattaaatttgagaaaagcggtcaaccaatcaaccataataaaaagaaaaatcctcacaattgagcaacttgttcataatccatgttagatagcaacaagcgtgcgagacaaccaaatgatgtaccaatgtttgcccaatcctcgtaagttcaaataactacagtacgttgttggagccattataaaaatttcataagatttgcattattggcccactttatttttttatttgtcatttcaaacaccgtcaatgtataaagcacacacacctttaagactactcccttcatataaaaaatacccagcctagtattggatgatacgttcatccaatattagattggttttttatgggatagacggagtataaggaaagatatacagcctatgatctcgtggagccgaggttaagagaacgtataaaaactaaaaatgatgtaatgtgactgttgttgtcattgctttattttttttaatgtcatttagtatgttatatattatcgaagctaatatatatagacagtacatatctctcatgttcatactttatagtacgaatgatcgtttggtgacggttgaaatgatgcaacgacctttcctaccttaattttccctcaatgcgaactgcattatattgtttcacaaaagaaagcgttccatccttcgtgaccagccaattatctcaaatatatactcgtttcatatatttttgtcaatgttactaacattcagaatcgaatggagtaaaagaagaacccgtgagtcacttgcttacgacaccctatatataaatggcatgctcatccacttgctgcaagtacactataatcagaggcttccgatgatcggtcgttgagaatgcactcctaaatcggtaagatcgctatttcaccacgcaaccacaacttcgttattttatctctaaattcacaaactttattccataatttcataatcacattatattatatgatttatattatcctttaaacgtagcaccttctattaggatagattagactaggtgcgagataccatgacaaacattgctaggcttgattgttcatatattgtgacaatcataatatcttcgttattaaatttatggttgaagtatagcatctgtcgcctaatctctgcacctcatcactagagttcgattatgccgtatatatgggatcgagatcctctaacttttaagtcacatgactttgagtcactgacatgtgagccctctttgttatggacccacatgtcagtgatttgtcaaaggattttaatccgtatatataaactagtttggttactaccctcacacaaacattgcatggcctggttttttccttgtgtggttgcttccgcgagaactccctttgcctggatctgtttgttcctcgcaccatgtgaaaagatcggacggaacggcagccagccagccggcaagccgccgcaacgagcgtctgcacttggcgaatttcgccgtataaaccaacagcgcgaggcaaggcgaagacgagagagtgaaacgaatgagttgttcaaattgtagtcaaaataaaacttaccaaattttgacaatatcaaaattttaataagttggcaatatttattaaaattttggtatgattttcttatgtatctattgaagtttagtgaaaaactaaacacatactttttccgtcccaaaatataagaatctattactggatccggataagacattttcaagtactacaaatctagaaagccaaatataagaatttagaaccggatgaaatattttttaatactatgaatttggacatactatctgtctaaattcttatattttagaacgaagagattacatatttttgataactctataatttaaaatgacatcaaccccgtcacgacaaagcggtgtgcgagtgagacctccgcgaggggcagaacagtcaatcggctcgggccgccacttggcgaaaggaccgcgcacgtggcgcccgccctggatcccccttatctcggacgcaaattacggtcctgcccctctctctcgagcaaaaagcgcaaaaagggcaccccgggtggggcccaccgccccctcctcctcatccacctcctctcccctccccccactcgctgctcgtcttctcgttctctcgctcgcgcatcgtctcttgtgcttctccacctgttgttccattttctcctcgcttatctcttcctcgctcgctctccctttcgcgcaccagaaaagtcgttttttaattttcgagtttccgtggaagattctcgatacctgtccctcgtcgtcgtcctcctccgccggccgccgccgacgaccgcagcaggggtggatccggggcggcgccgattcggtgagtccggtctcgcgagctcgagctgtttgtttgtttgtttgtttggtggggattggattgggttggatttgcgttgtgtaggctagccgcatcagcgccgcttgtttggtggatttcgtgagctgctgctggattagggggctgggattgggattgggaggggggatggatcatggatgtcggtggattgggggggattgggtttgagtgttcgatttcgagtccgcttgatcgtttctgtggtgttccagggtgtttggtgttggggagtctgaactgattttttggttttctttctttttgcggacacttcacgctttctctcgtgttgcgtggagcgtacgtgagtggtttttggtccggctttagctttgagctggactttagctgctcagaatttgattatttttctttctctaattggagtacatacaagtacgatggcttagcatgtttcagtatccagttcagttttcaactagaaaatattaacaatttcatcccctctgcccttttgtctactgacataatagtcgtgtagcggcaactgcggttagatgcagaaaggaagcccttttgtattcttaaatttggataatcttaaaaaacaaaataacatttctcttgcttatttgagtggctcagaaagtttgttgcttttatccacacacggcatgctttatatgatcagagaagtggggttagtgctatttaaaacttaggattagtcccgataaaattgtttgtattgtggagatgcatgcttgttgatttacatgattagtgctcagaaaaggtgcccttttgatatgcaaaataggacataccagcgtcaaaaataaagggacataataaaatgagcaaccaggatcattgttggatgcacagctggtgaagtcctatttgtattgccgcttctagctcttgcccatgcatgctaataagccatcccatgctggtacgaaaagtgacttttattaactcagaaatgctatcaactgcagctagcatttgtttgctgcatagctccatgttgctaatttcatgtttttccattgttatcagatgcattgtactgctctctgctagacttgtctagtgaattggtgttattgacccttattttttaaacatggatacttttttcccccttatatgctttacagagaacatgcgcttacaggttacagactgacagtacataggatagaagataaaaccgtaacatttaccaagaaaaacttcctgcaagtagttttgtgcccttctatttcagagacttttgagttctttatgcccttgctagcaaatcttgggtgggataataaaactcaaaactcttcacaaattgttatacgctacctatattttaaattgttactaagtcaatgaatatattgattgctcttgttgtgatacatttgaaatgtttctgttggttgcagagcaattcaagtggttcatttcatggcctgtatcaatatacttatatatctccaacacttaccaaggaatggaaacaaactcatcatgtaacatgggctgcaaaatctgtcccttcttttctaatttgaagtgtgcacatatttgctatattttccattaaaaaaatatactactctctttccataatgttcaattataagtttgttgttttgttgttactgatttttgtttttggctttttgcacaccagtatcctggtaggatcccactgaattcaactgttgaacaaaaagccaggaaggtggctgttcttgtggcactcagtgctagtggaagtgctccagtactgtacaggaccatggatgctctttgtgatttctgcagggagcaaaggtcaatggtctattgccgatcagatgcagcatccttgtgcttgtcgtgtgatcgtaatgtgcattcagccaatgccctttcccgacgccatacaagaacccttctttgtgatcgttgtgttggacagcctgcagcagtccgttgtcttgaagagaacacctcactttgccaaaactgtgactggaatggacatggggcagcatcctcagctgctgggcataaaaggcagaccataaactgttactcggggtgcccatcgtcggcagagctctcgagaatctggtcctttagtatggatatcccaactgtagctgcggagccaaactgtgaggaaggaataaacatgatgagcattaatgacaatgacgtcaataaccattgtggtgctccagaagatggccgcttgttggatatagctagcacagcactcatgagtgatttacctacaggagacaagttcaaacctttaataggttcttcttcaggagatgggatgaatcttctgccacttaattcagatcagccagctgagccagtttcaacgacgcctaaggtgcatgcttctcattcccctccaaaacctattcaagtattctgctaagtttctgcataggtcataacatattgcatggacatattattacaccaaatgttcacactgcgtggttgcggtttcgaccatgtactttgttttggtattcttctagaagtgaacgttcgaagggaaaactttctgtagtttgaccaatggtacaatgaccatcttttggtcattatttattactgtttgctactttcttaagagttccacactgtcaaagctttcctggtgtttttctcctgccgagcaagttactcttatcttctaataattttaccattgaatgtgaattcacctagatcttataattccctaatgatgatggttgaacaattgctgcagttggaatttgtgtatttccaatatcattattcatgaaaatgtcatctgcgatgcctgtcattatggtgtcactgcgtgcttatcgaaacttggttgcataattcaggcaccctgtgtcacagacaaagatatgttcaatgatgggagcgtatatggagacttctgtgtggatgatgctgacctaacatttgagaattatgaagaattattcggtacctctcacgttcaaacagaacaactctttgatgatgctggaattgacagttattttgaaatgaaggatgtgccagcagatgaatctaatgaggtccgtacctttctgcatatagtctttttatctgctgtgtttgttgtaggaaaagagctctgttttgctatttctgaccttcccgccataatcagggttaatctcgttttcctccatttgtgcttatatcgagttgaccctaccattttactgagaatcattaaatgattgattgggttaattaggagtggaatgtctgcatatctcatcgtccattttatggctattaattattttactaaaattttggtatgactgttatactttcagcagcccaaacctgtgcagccagaatgtagcaatgtcgcatctgttgattctgggatgtcaaacccagctgcaagggctgattccagccattgtattcctggtaggcaggctatatccaacatatccctttccttctctggtttgactggtgaaagcagtgctggatattttcaagattgtggggtatcgtcaatgatccttatgggtgagccaccctggcatcctcctggtcctgaaagttcatctgctggaggcagcagagataatgctcttacacggtacaaggagaagaagaagagaagaaagtaagtgcatcttactgtgctttttcagttttttgaaagtaagttcatactagtacttgatatgccatggttaaatgcattacagctaagaatgtggctgcagtatcattcaattttcagatttggaattctatattaaaaagcttactgtgccaaatcgatattttcgtatacacgtgatcattttagacatgtggatgcttgctcctagtgtgaatgctactttatgtttttcttaaaagaagttattatatggcctttcttcacatattttcttcttaacagatttgacaagaagataaggtatgcttctcgtaaggctagggcagatgtgagaaaaagggtcaaaggacggtttgtaaaggctggcgaagcatatgactacgatccgctgagccaaacaagaagctactaaagcctttcactcgattggtttcgtccagtgttcaagtagcaattttcagcagctgatttgatgttggttgcacggcaagcatgatcactggagaacacaagcaattgcggcagaccttgcaattgaaaacggggaaaggaaaccaaacgctgtgatcaaatcaaattaatgaaataaaaaaggaaaaaataggatgcaaacatgcgagaagctcatggatggtaatgctccattttctcctgtacagttcatgcatcttcagttgcttctggttgagatgtctgaatcactctctaccatctgtgcattaatcaaatacaaatacatgggcctaccgcacgacgacgaacgcacctgcttctgttgtgatgttttgtgttgcggctgtcaggctggatctctaggtaacatgattaattatactactgatggaatttgcaccgctgtaatattatttacgaatcacaatctgccgtgggattgttcttctgtcgtgtatgtatgtgtatatagatggatggctgttaagaaaatattgtgacgattataaagtttacctttgtaaatgatagtaaaatgctgcattgatctgtagggtgagcatagagctttattcaaattgagacgtgatcaaacatgcgtgctaatttggtaacctaaattgaaatcaaatatgcatgcaacctaagtagatcactaactcgatctagcgcgaggctgctgtctcctctgtcaaactgacatgaacggtaaatctagcgcgaggtcgccgtccccgggatccgccgtgtctgaggccagcgtgcaagaatccaagctcgacgcgagagcgtcggcgagagggtgctgcggcggcggcggcgactctgactccgcgacgccgccctccatggccgccgagtcagcggccggcggcgggcaagtggcgcccgtctcggcggcggggaccaagccgctcaggcggtggtgcttgatccggcaaccgaccgagatgcgcgaggcgcggccatcgacgaccgagcgttggacgtggcggtggaggagcatggtcccttcggcgccgcgggcggcgaaggagtcgtggtcgacggcggcgaagacggtgattcggtagacgcgccggtggcgccgcacgtcgcgggagcgccccagcggcgtgcacccttcggcggcacggcgctgcctgccggagtcgacgtaccggaggcgcgcgttctccttgggcgtacggtgcctgacggcggggcaggcagcaaacctgcccctagccgccgcacacaacggtgtggccggcggcggcggcggtgtcgtcgtcttccccgtcacgatctggatcctcttttcacaaaacggtgacccgtcgtagccgctacttccttcgatcgggtgccatcgtcccagcagcatgtcaaactccttgggatcgtcgatggctgtgatatccatcgatcctgattccatgggatcgtcgatggcgagtagcggcgacgaggaggacgggagataagattaattctgatcgatcgggatcgattcactagatgcattggatgatcttatatggcaacgcgtcctcgttggcataaagttagaatcggaccgggaatcctggatgggctagctatgcatgcatggaaccaccacccgcgtttcctgcttaactataacatttaacgctaatgacggctaattagggaagattatgaagattttctcttttttttttagattttttactaacagattgaaaattttttaagttagattcgaaaactttcgatttaagatttaaatttttaagtcaaattttgaaaactttcaactcggatttgaaaacgttcaactcaagatttgaaaacgttcaactcagattcgaaagcttttaactcgagatcgaaaactttcaagtccagatttgaaaaaaaatgaaaattttcaacttgagatttgaaaatttgaaaactttcaactcgatattcgaaaacttccaaatccagatttgaaatatttgaaaacttttaacttgatatttgaaaattttcaacttgagatttgaaaactttcaaatccaaatttgaaaaaattaaagttaagatttaaaaattttcaagttatggtttaaaacttgctaattggcgtgaaaaaaaaatcaaaaaaagagagagaaaaaacgaaaaagaatcgcgaaaaaaagagaaaaagacgcaaaagagacatggtgggggccgcgcgcgccatatcgatatctggcgcgcacgcgccaattagcaatcctgccgctttgtgcgatttggggtgagtgcatcgtcaattcaggccgtccgcttcgggcggtgtggtgttctagtttgttattaacgagtcatgactcattagtatacagttgtagtttgttattggaaattagtgttatgcctaatgtcctattttaaaaaaattaagatgaagttttcagcttccggtttttacgaaattgctcccgatcagtcgatcggagggagggagcgaaatcggtcgctcccccccatccccacacacacgcgcgcacgtgccgccctggcccaccacatgtccgtgaccgaacctaccacgtgtttccaccacatactccgttgcaaaaatcaccacatattttggaattcaagtagtgtacacataatgtttcactatatatatatatacctaatgttgtagtgaattgaaacattcttttgttaagggaattcgtttcattttttgttccacaaaaatgtttcacctagtgtatttataatgtttcactgtgtaaggatcaaatcttgcagtgaactaaaatattgtttttatataaggtgaaacaacgcccgatttaaacaattgaaacatttcaatttagtgaaacaattccgatatacttgttggaacagtatgcaacatttaaaaataattcaataataagctaattttttttgttggaatatatccatgtgtgatcttgttttaaagatttaattgcaacgaatttaatggtgcaatcagatcataatttagataaataatttaagagaaaaaatagtttaaagtgattttgcacacatgcatcttgcatcttgctgacatcagcataatggcgccggattttcctaccccaggatcgagcacccgattctgagttgcgtctgacatcagcataatggcgccggattttcctaccccaggatcgagcacccgattctgagttgcgtcctggtttttatgtagttcattttgtggcttttatatctaaattgattggagtagctagagattgttaaagcttagaagctcccaaagagcccgctcctctcttatcattttcaacctatgttaacatggtaagaacacaaaacatgaaaactattataaaccctcgagagaatgtctacttattatttaaatgccactcaaatattaactatttaaaagattcgtatttttcctttcatcaccttaattttttgtccgtgtattcgaccgtaaacctgtacatcctaattcgattgtgttagggatggaagaaatcgcaaaaaaaaaaaaaagaaacccactaaaccacccacggatttgcagccgattcatcacagattcacctcgttgggaagccaattcatcacagattcaatcacaaggggaaaatcaactaaaaagagaaaaaaatgaaaaacaaatctcttaaaaattcatcacaaagagaggagccctagcgtgcccgccaccgccaccagctcgtcgctgtcgtgtccgccaccgcaacacctgctccaaccgccgcctactcctgcgcccaactaggaggaggtcgtagccgctgccggggaagggggctgcctcaatgaggagaggaggacggggtggagccggtggtcgactggaccgacgcgggaagccgacgtcgccgccggatccgcccgtgggaagccgcaggagggcacctccaccgccgctgctcacggtgggggagggcaccgccacagccgcttggagagggcgtcgtcgccgccgctgctcgaccaccgcaagagggggatggaggaggaggtcatcaccgctgccgaggaagggggccaccgcaacgaggagaggaggacggggtggagccggtggtcgaccggagcggcgcgggaagccgctgcgcgcgcgcgggagggggggaggagggcgccgtcgccaggctctgtcgccgccgcggtcgctttgagagagaggaagaggatcgggggattgggctgaaatagatttagggttaagggtttggttgaccgctatttataatggtcgtggatccatcggtcccagcttctcccgcatggggccatcgcactattgggccgtatatttgggccgggctaaaatcagtgctttttccatctcaataattttaagtatttttctatttcgtaaatatgagaatttctataccataagagtcaattttatagagaagtccttgaattttaaggatattactaaacacactataatctaggcatatgaattcctaggaaggtttaaattgatgtactaaaaagcaaaagtaccaaagtagtatgaaaataacttcggttaaaaataaatatttttagttataatacactatagcgaaacacgggcattttgctagtagttataaatttctttaaaaaaatcaacaggataaattaatgtgatagatcaatccacaatcatgcaatgcatctaaatgtcgcaatgaaaaaaaaatttgaccgtgaataaatatgatagtttaatttgttttttcttttcttttttgtaatttgtagaaattgaattttaaattgtacttcctctgttttacaatgtaagactttctagcattgcccatattcatttagatgttgtatgtggacaatgctagaaagtcttacatttgtgaaacgaagggagtatatatgtttgtagagtgatatatcacatgttaatatatcttcttaatttaacaatttaagtatcatacaaacaacaaggggtcatctcctcgagagtttaaaatccactctccacaaaacacaccattgccgacataaatctacaatttatttgttattctggatcattttactctaaaaaaaataaaaatttgataacgcctccaaatccccctttccccccttttgctccaaagataacacgccatatatacaaaatcgtccgtttctgttttacgactcagaccgacatgaacgcgaaatctagcgcgaggatgccgtcccggggatccgtcgcgtcggatgctagggtgcaagaatccaagctcgaggcaagaacgtcggcgagagggtgctgctgctgcggcggcggcggcggcgacttcaactctgcctcgctccccatgtactccgagtcatcggcggccggcggcgggcaaccggcgttttccgccgtcttggcggcgtcggggaccaagccgctgcggcggagctggatccagcggtccctcatgatggccgaggtgcggccgtagaccgagcggctgatcttcctccagctgccgccggtgtggcggtggaggcgcacgagctcctcgtcgtcgcgggcggtgaaggggcggtggtagacgtcgcgggcgaggtggtggcgccacctggcgcggcacgagtcaccggagcgcccaggcatttccctggcgaccttccaccattgccggaagaggttctccttggcgagccgccgcagccgctcgtcctcctccgccgtccactcccgctcgggcagccgccgccggcgggagcacctgcacttcgccgccgccgccgccgccgccgccgtagccatggacgtctctcctcctcgggatcgtggttggttgcagcgagagcaagggtatcgtcccagctgcatcttcttcctcatggacatcttctcgatcaacaatctctcttctcgccattgcgatcgattgctactctctcctcgccgtccccatcgccactgcttgctacttccatcgatcatcagttgaaaaaaatccaccggcaccgccggtatcgccatctcctccttctcctcctccatctcgatcccttaattcggattggggtagagacgacgacgagagattgattggttatgatcgaaattgattaaccgcagatcatcatatatggcgaacagaattggaaccggatcggagtcgtatcgcgctaggacttgtagatcttgtgttgccttattgggccgtaagtgctcggagatttgggctgagcccattgttagtttgggccatccgcaccgggtggcgcgccgtgtgccgctgtttcctcccgagtttgatacgaagcaaccgacccgtgtaagctactccaccatgttagttattattatggcgatatgcatggtgggtggctatctcgatgaattttacatagctgacctacttgttagtactaacgacttcgctagaaccgcaactttgaatgagcttagctgtaatcttatctgaaggcaatgcaaactagtgctatgttgagttgttgaaaattcggaggctacggggatacggctaaagcggagtactcgcactcacactcacactcaccatcgactgcgtgcaatttatctcgtcgccaccgccaccgtgcgtggtccacctattttgatctccctttttgctaaacagacgatcagctcttggttcccaaacaatctcacaaccctggaacaaaccatgcaccgaaacgtcgcttaaatccagcgagaaaaccaaccaaccacttcttttttcgtgaacgcataaaaaaattacacgtcaacatattagtagaagaaaaccggccaaccacaccacctcgcgtgccggcgtgccgccactaccactcgcgtcgtgtcgcgttcgtgctcgtggccgcgtagcggagtacgctgctgcgcacgcattgatttcatcccaccatctcgtggtacgtacacgtccgtctccgtccccatggcgcgcggctaaaacgagctctcgacccccgaaatagcccggcacaaacacgcaccacccgcccgcgcgcctacgcctaccgcgcaggaggcagggcgagcgagcggcctccctccctcgctgctgccgcgcgagcgcgccgacgctgctcgatcttggttttcgcctgtccgggggcgggcgagatgatgaagctgcgttggtggcgggtggacgcgtcggaggtcgcggccgtaacggcgatgggcgtgtgggaggccgtcctcgccggcggcggcaggaggttcctcaagaggaaggacagcgacgccggcgagactggttcgtattcgtatcgtatcgtaccgtcgatcgcccgatcaatttcatttctcaccaaactcttgcgcgtttgttgggttcttcgtggaaatcccaccttttgcgcggttttagcgttcgtgcggtttggttcgtcggtctttttctccgcatttcaagagacgagatcttttaggccagtttggtgcattttttggtgaaatgcggtgtaaaaactgctccttttcttttgcacttgcagttactctgctcctagttgctcttgctcttgctcttgcttttgtgcgtgtgtgtgaagattttggtgctggaaatagcacgaaagatgctccctttcgtggttggttaccattccattcgaacggcgaggttgttgctcgacatgttcatgtcatcatcgcatcgaacttgcttgcgtgcactagaccacgagtgatgtcttctttggttttcatgggaaaaaatcgtctcctgcatggcaaatattctgtgagcaaatttaggaaaggaaccgaagcagctgagcattttcttcttgttcttcagcgattcacgacacactcactcactcctgctagagcccattttgcatctcctggtgttggccccttgtgttgctgcttctcggtgttgctgctgcgcccgtgccccccctgaaatcagtggtcgtcctgctctgtcgctttcgcctacatgatgaaatggttgaatgattccctgcaacgaaggacatgcaggtgacagtgttggcatgtgagcttctgaacgttgcttggcacctggcgcacgcagcgaatggaaacacgatcaccacagtggtgttattaggattaaggaacagctgggttcttgtttgtttcagttacagtaggaatttggcgtaaggtctctgactgacccagtcaagctgggatatgactgaacatatagtatatcatacgaactcgtgataaattattatgatccattctttaacctaatccaaggaaattaagtgctgcagttccctgcatcaatggttaatcatgaaaaagtgaccatttttcgatcgcttcctgactgacttttgaacaaagcaggtcgtgcgttggaggagttgcggagttcattgtacaatgaaatgcatagctcagaaggggccaagcgacagcagcagcggttctgtggaccaagtgttgcactgacatttaattttgctgttgctgttggtatcatcatggcaaacaaaatggtagtaatatttttttttaaaaaaaaagtgtacagttttttgtatactcgtgcaaatttttttttttggtctacaaggaaacatgattgttcacacacaggatctactgtctttgtaggtgatggggagtgttgggtttaagttcccaattgcactatcgctaattcattacgcggttgcatttgttctaatggccatccttaagacgatgtccatgttgccagttgctcctccttctaaatccacacctttctcttctttatttgctttgggtgctgtaatgtctctctccactgggcttgctaatgtgagcttaaaacataataggtaaacaagattctatttgacagcgaactgcacttgcattttatgttctgtcatattgactttatatgctttatgtgttctcagaattttccgctgttcagtgtaggtttttatcaaatggctaagattgctgtaactccaacaattgttgtggctgaatttatgattttccagaaaagggtttcctctcaaaaggtaggctttgacgaaatgtgcctcttacgctattctgtactactgctatcacatggtatcacagtaatttcaactctgcactcattaagcacaaaaacaggcaagaaaaatattaaaatctagaagaaaaaaaaattagtgtgcatgctttcttctccctctaccagactgcactcacgatatctgtgtgcatgtttttgcttgtgggagtgctaacctgttgttttttcttgtccaaatctgtctccaacattgcaggttatcacactggcaattgtgtcatttggagtggccgtagccactgttactgatctagagttcaatttcttcggtgctgttgtagcattggcttggattgttcctagtgcagtaaacaaaattctatggtcaaatttgcaacagagtggaaattggactgcccttgcgtaagctctgaatttacttccaatctcttgttacatgttttacctcactaagtaataaggattgtttaaccagattgatgtggaagacaactccggtcacgatatttttcttattggcactgatgcctttgttggatcccccgggcttgctgctgtttgactggaacttcaggaacagcttagctattatcatttctgctttgtttggcttcctactccaatggtctggcgctttggcacttgggtgagatataatacatcactttacgtaattgtgctggcttcaatcattcaaaatggctctttttttcccaggatttgtggtcaaccctgctttcttatctttcttttttttttctttgtatcttgcaatgagtgtgatatctgaaataaataatttcccatggaccatatgacattcctagtggcgtgcagagtccgataaacgatagagttacatcttactacgggtgtgtttagttcacaccaaaattaaaagtttggttgaaattggaacgatgtgatgaaaaagttggaagtttatgtgtgtaggaaagttttgttgtgttggaaaagttggaagtttgaagtaaaagtttagaactaaacaaggcctacataggattgcaattgatgtaacctagcttctagttttggcatcttgttgggggagaggatcatgaaaatgacgtgaataagatagatgacctgcacgtttgatttcttcagtcacacttcaactgaaatttaaagcttccattaattataagtagctgataattccacattcaaggtctctcaggttgttatgatgctcaaatgtactctctctggtttttaatgtttgacgctattgacttttaaacacatgtttgatattttttcttgttcaaaagaaatatagaattatcatttattttgttgttatttgttacctcataactatggcttttttgtatatatgtatagtttttaaaataagacaagtggtaaaggtatgtttaaatgccaacaatgtcagccattaaaaactgaagggagaaacgtcctggggttttccggctagcttcacaaggtggtgggttagacgacctgggttcgaagcctcacccctcctaattatttgatattaggtccttccctaatacttgtgtttttcattaaaaactgaatgagtaacattttcagcttgttggagacagagattagcacaccacatcatgtcaactatcaagaagtcctatttatcatgtaccatactattggttcctgaaaacagtttggccatgcatcacttttcagtcatggctgcaacaatcactccatttctgcaataaaatgcagcttggagatcacttctaactaacttgctcttgatcgttgcagcgcaacatcagctctgtcacacgttgtgctggggcaattcaagaccatagtcataatgctctcaggttacctgatcttcagctcggatcctggaatcaccagcatctgcggagccatcgtcgctctcggtggcatgtccgtctacacctatctgggtctgaaagagtcgacgacaaccgggaagaaaccgcctttagcacagaagcccaaagctgctggggatggtgagaagcctggtttggagcatgaggattctgtatgagctgacgaggattattcatcctggttggtcgattgtactataagcatacttaggtgattctccaagagttgtacgccattgctgagtccattgtacatagaaacacttcatgattttacccttttacagttcttaaaaagttcaaaaacattgcctcacaattctcttcgtttcttttttcttgctgataagttccacagttgatgtcacgtaagatgaagaacatgtcagcatgtcacataggataggaaccacgtaggaggaaaccacgctctaaaccattcgggaaggtaaattggtccggttttaataattgacggagcatctatacccggttttgtagttcatgaacatgaattggactcggcctgcagattgagggagaatatatgaaccttttgccatattgtttttctaagttgaaacgggggacgcgtgcgaaactggcccattatttctttggatcaatatactcaagttttgggccggcctggcccatctagcaagcgaggtagttatagctctctcgccgagggcccgaggcccagcattaaaacgagcggctctttcccctctccgccctctctctctctctctctctctctctcccatggcgaagaagggcgcgccgcgcaggcagccgccgccgccgccgcctcggcaactggccgcggggaagaaggggaaggcctccccgaaggcggcgaagagggcggcgcccaagaagcagaggctgctcgagtcgtcctccgacgactccgagctggagcagcagcaggggcagcttcaggaggtggagtccgggtcagacctcgacgtcccctctgattccggcgccgaggagctctccgactcggacgacgcctcctttgagggaggagacagcggcgacgaggaggaggaggaagacgatgaggatggcgacgacgaccccctcgctgacgacttcctcgccggcagtgacgacgaaagtggtaatgcacggattactattgaatcgaattagctttaacaacgtgcttttcagccttttccccatcaagtcattcgattgtagcattcacgcgagctagtattgtaataatcgataatgggaatgcaatgctgtattgtacatctaggggaatatctattgatgattgtattgtgttttgtagacggaggagacgactctggtgtggactcagatgagtctgatgacttagaggcgaagtcgcgagcgattgatgaagagaaagagaaggcagaagaagaggctgaggaggagctcaagctcaatattagatcagaatctgatgagttccgattgcccacaaaggaggttgatttttccaccttcttttatgtcttcagttttacgtgccgctgaaggtccgcaagtgatgtgcacatatatcatagtttgtatgctctgcaggagttggaggaagaggcacttcgaccaccaaacctgccgaatcttaaaaggaggatatcagaaagtgtgttcatatatatattttgcattaccaagtttatgaattttttagatgaatcagagaaaactcaattgagatttggcataatattagtgagctaacaagatgtagctgttctcttgtgtaaactccaaggcacttcgaccaccaaacctgccgaatcttaaaaggaggatatcagaaagtgtgttcatatatatattttgcattatcaagtttatgaattttttagatgaatcagagaaaactcaattgagatttggcataatattagtgagctaacaagatgtagctgttctcttgtgtaaactccaagggcaaatttaagctttataactatggtcattttgcattgtgatagaagcattgaatatttccctttctgacttttctttctgcccattggtcttcccctctagttgtccgggtactctcaaactttagtaagctgaggcaaaaagatgtgccgcgaaaggattatgtcaatcagctgaagacagatataatgtcatactatggatacaatgattttctcgttgaagcatttattgaggtgagcttggtgccgtttgtttctttccattgagctgtgcgtttccccaactgcatcaggttataattagaaattattgtctgacatgcttattaaaatatgatcatggtttacctgctatgagttaacagtatacatatttttactgcgcagatgttcccagctgtggagcttgttgaactactggaatcttttgagaaaagaccgcctgaatgcttacgaacaaatacattgaaggtaactatttcagatctcctgatatgtatgtatgtggtgccatggaatacatgattctttatatgtgcttcagtcttttctttgcgttcttcatcgtccttacctgctttgttcatgatgttggcagacccggagaagggatcttgctgctgctcttataccaagaggatttaatctggatccgatagggaagtggtcaaaggtatgctttgttcgatcttctcctttactcaagtaatatatccaacatcccaaagcaactctcctggtataaatggcaggtaggccttgttgtatacgactccaccatttcagctggtgccactgttgaatatatggctgggcattacatggtaccttcttctccgatatcattgtgtgtagattatttcatttgctctccttccactaatgttggtattaaaaaatgtgactacagaaacaaggtgcaagttctttcttacctgtgatggctcttgctcctcaggagaaagagcgaattgttgatatggcgtaagatgttttcctttgtctcatacacttttggcaattgttcactatcatgacttctaagttattatgtgatccttttttttcaatgaacatgtaattgtaatatgccatgtatgtaatctagtcatgctgtcttgatataccactttgcttctgaatttgatgatacattcaactgaattaattaccttgaattcatggaattcatgtcctcgtttctgatcaggaactcattcttttcttgtttccagggctgccccaggtggcaagactacatatattggagctcttatgaagaatactggtcagtatgctgcctgtttttaaatacattttgttcctccattggagtaattttgttttgtgtggtttcttgccaattgaaatgcaaatatactgttttattcatttgtcatgcacaggaataatttatgcaaatgagttcaatgagaaaaggctgcatggacttttgggcaacatacatcgcatgggtgttaccaataccatagtttgtaattatgatggtaaagaggtgagcaaacagtacaaatattgttaacgtgctatctgatagccgaaacacaatcaactaattttatgcattaagaaagaatcttgatttgtggtatttgtcaagtacttagtataatgtaactacagtatattgttttgtacaaaacgataacagaatgaaaacacattataagtattgttacataatctctgaccaataatttttggtccattttaatcatggagaagataaatgtcaagtcctaataatttttggttgcttgaattgggtgcagcattttctcattgaaaacctattttgtgataacattctgtttatttcagctacctaaagttcttgggatgaattcggttgacagagttcttttggatgcaccctgcacaggcacaggggtaagcatcatatagttcgtataagctcctactcctgtcatattttctcatttatttaaacagatgcttactttttctgcagaccatttggaaggatccacaaattaaaacgtcgaagggcattgaggacatcagagactgtgcttttgtacaaaaggtgcatttcttgtatttctaggtcttgtttaaattgaacctacttaccatttggcatattcccacctaacaattctaaatgcaattcttcttatgttatcgaggaaaagaactgcattccactcacattattccaattttgattcttaaccaagtcacttgcttaaaacattattggttcgtcctcgtgttgagtttgttttttgggggtcatttctaagcaatttatattgtgcagttgtgctgattcttacatggaaataacatataaccccagaattgctatgttctgtttgctcatttttatggattatgtttacttaatctgtatttgctaagctatgtgattgtgttcaatcataatttggtcttttaagctacacaatttttgtttggtcagttttttctaaatcgagctgttattctatactggttgagtacctcaatcaccttgaaattggtatgtataccactatttactgtctaactgatgagttgttttacagcaattgctattagctgctattgatttggttgatgccaactccaaaactggaggttacattgtttactcaacatgttcattgatgattccagaggtaagttcattggccttgccagttcaatgatagtcaacttagtttcttgaacctctctccattcttgcagaatgaagcggttgttgactatgcccttaaaaagagaaacgtaaagcttgtaccttgtggattagattttgggcgtccagggtactgtaaatctctctcccatgacctgttatgaagaatttctacatttttatcttattactatccgtttatcctacagattcatccggttccgagagcatcgattccatacttctttagataaaacaaggagattttatccccatgtaaacaacatggatggtttttttgttgcgaaggtaacaccaatgctaaacttcatggtgaaatatctaatctattaaataggttgtttgatcaggtgcttatttcattattaggatgtgctgaatgtattgaactctattatgaaaagtttaattttctttgcttagtttggacataccatctgattagggtacttcctttgacgcagcttaaaaaattgagcaatacgatcccagtggcatctgagtcatctaatgtgcctgaagaagcaattgagaaggctgatcctagcagtgacgatcctcaaaaacagcccattcagtcaaaaaaacataaagatgtgaagacgacgaatgaagagacaagcatccttgatggggtgactaaggacaaaaggcagacacatgagacactcaagaaccacaagaagggtaagaaacgcaatggccctgagagtactaaaataaagggagaccagaaagaaacacacaacgaagaagagcctacaagtgaaaaaaagcagcctgtgtctgctaaaataaaaaaatctgttcccaagagaatatcaggtaacaaaggaaagaagctggatacgggcaaaggagagaagaggaaaagaaactggatggtgaggcgagactggtgagatagtacaatgatgttgtgccttttcatgccttggaattgttgttttcgttgctttattctgatttggtgtaatgatcttctaacagggaagcttataagaagtcgaggagtaaacaagtatgaaaggcacggatgaaggagctctagccgtagacaaattgcagttaaatttgaaaacccacatacggggaagatgttagaaggagcgagaatacacaattttggcgttggttcaagttcgaggcgaaggaaaatttttgttgtacttaagtctagtgaagtgatcgtctgtagttttaccctttcttttccgtcttggtttaatgtaccaatactaaggcacttctcggacatgagttatgggagtatgtgattgacttcgtcatgttgcctggtaagtactatgctggccgatggaacagtatgatgttctgcttgctaagggcgacgtgtggttgtgctcagggttaggggcggaaatcgtgctggctccgctttttattgagctttctttgaaattaatttaccttcatatttaaatataagctattcctctgaaaaatatataatcctgtggtctttgtgtgtaactctgatattgtttttctattaaaatacaacgataatatctaacataattatactaatcgtatgaaaagtatttagaaagaaaaatctacccaaatcgttcaaaatcgaataatttttatcttataagaaaccaagccagttaaacgactaattaaacgagtgggtttatcgctgcttcatatagttatattccttatgtggtggatgcaaccatggctgaagcagcagctttaagagatggattattattggcacaacaaatcggtcgtagtcgtgtggaattccaatcggattgcatggaagtcgtcacaacaatgcaagagggaggtttttctgccacggcagcagttgcgatttatgatgaatgctcccagtattggaaagattttctttctatctccattagtcattgtattagagatagtaatgtcgtggctcatgagctagctaggcaagctttgataggcaaaaattcttttgtttggatagatgatccccctgatttcattcggcaacttcttcttaacgatgtaactattttctcgaatgtaaagctagctgtgagaatttaaaaaaaaaacgagtccaagcagattagcgttcgaatactcgaattgataggttcatgacgttgcgggggttcaggaaaatgaactccgaccagggatggatccagaaaaggctcagggcctggttagatcccactctaaaattttttactctgtcacattgaacgtttgaacatatgtataaagtattaaatataggctaaaaaataactaattgcatagattgcgactaatttacaagacgaatcttttaagcctaattgcttcatgattttacaatgtggtgctacagtaaacatttgctaatgacgaattaattaggtttaataaatatgtaattagttttttttattagtgtcgaacaccccatgcgacaccctatataatactccctctctacttttgataatcatatttctaaatctaaaaaaaatatttttataggtatatttcaatccaacaatctatcctcttgaaagattgactacatggacatcgagaaatgtaaatattaatgaatcgcttatttatgaggaatgattagtaacatgtttaaatggatgataagtagaattactaatccttggtctgtgtggcaatatgaaatatgactatcaaaagtagatggagggagtacccgatatgacacgctaaaactttacacccctcatctaaacacctcctctgttcgatgcccagctatagcccaattatttatttatttatttattgcggagagaaatattcaattttgatggatcattgcagtaatagccatgaaaccaagcattaaacatgggatctttagcggaagataacattaacacgaaaataccaaagaacaacctcacacaaaaccactatttattattccatttacgagaacttacatgactgtaactcagtaacactttgataactaatcacatccttaacctgctacttagggcaatatattcatcctaataaagtaactcctgatactaactaagacgaccgtggctgtggtgaagcatcagatataccaaggcgacacacctgccaaaacacaaaaataaaaaaaggtgttagatccggatcactttttttttaaaaaaaaacagattgttcaaaattcagagaattccaaacatgaatttacctgaagatctatggcgacacggaggggctagcaggcgctggagcggcaggagacctcggaggcaccaatggcggcaccgatggagctgtcaaacacaacaacaacagattagattaatcccttcatcaaacagacaatgcgcattaaaaataaataaacatgatttgtgctagggtttaatgaggtgtaattaatcgaattttaacttacaggagcacatgaacagcgtctgcagtggtggcatggcgccgcaggtgatcgggaggagcatcatcttcatcgggtcgacgggcgtggggaggaagctgttgagatcgccgttcatgccgtggcagaggcagatgggcgcggtgctcacgagcgacctgaagccgtcgcagcaggtggccggcggcgtcggcacggcggtgttcgtcaggtagtccgcgcacggcatcacggacatcagcggcgtcatgcactcctttggctgcggctgcgccggcgagctaggttgcgggagcgggaacggcagagggaacgggagacccgacccggacgacggaggagcgccagcggccggcgagccatgcgccgggagcgggagcggggacggcattgggaacgggaaacccgacgacccagacgacggcggagcgccagcggccggcgagccaggcgcagggagcgggagcgggaacggcaacgggaacgggaagccgccggacccagccgacggcggagcgccgccggcgccggccggcgagccagggatcgggaacatcaggaacgggaacagcgggaacggcaagccgggtagtaatcccggcaatgtcgtcggcggtcgctgcgctcctccgctcaccgacgttttctccacggcaatggccggctcgaacccttggaccctcgcttccgcggccggcgccagcgtcgccgccacgacggcgaaggcgaagaagagggcggcggcgagcttggacgacggcgccatctctctcgtcgggatcggtggctttgggtggaggtggagaggtggctgatttgctgtgaagagctacgtgggatcgctcgcaatatatagtgcattttcagttagagatttggggtttgaaactttgaatattcatgtaatgacattggactctggattaattttcgtacgtaattaagcaggtaaacatatatccagcgaactcacgagttcaaaatatgtttgatgcttttgtaaaaaaaataaaatctctgctctcgtttgcctgtagggctgtaagagatgatacagcgtacttgcacttgcaaattgcaatgcggatataatgtcaggtacgtgaaattcttcacatttttcagataaaagtagccagattttaaatgtttcccgttgtttttcatccctaagaggagaagactaccattgttaccttacatgcatggtgaagttggagctaatacttctgtttgtaataatgagaattcaggactttacactgaagaattaactagtccaactagtatgaggttctggctctggttttgctcttcctcgaagagataatacagcccctaaaaagttctgaattttctgacgatattgagagcatagaactcttcagttttcagataaatcgcagagtctagttagtggagtatgacgttttgtctctgatttcgcttgcgtcaaagagataacataactcgtaatagaaattatgaatctctgatgatattgagaacatataactcttcattttcagataaagtagagagtattatcaatttcttaattccataaggtagaagtacgccattgttgcgacacatacatgatagtcgagagttatgtaggagtactaatcagagctatgctgaagacatgacactctgcagtcctgaataaattcaaattgcgtcttgtcataatatccagtttcttactccctccgtcccaaagtaagcgcagccgtgggaatccgtgttcaacgtttaaccgtccgtcttatttgaaaattttatgagaaaattaaagtaagttagtcacacgtaaagtactatttatgttttatcatctaataacaataaaaatattaatcgtagaaaaatttcaaataaaacgaatggtcaaacgtgagacatgaacagtgcaaaactgcacttatttagggacgaaggtagtagatggggtctttgattcttactagtaatttctattttctggatcacaaattcaaaacgactagatacgggccattattgggccgtccctgcgtaacaggcctaagctgagcccaattccacggccttttcgggagtttcttgatagaacgggcaggaaggggcggagttttcttctccgaacccctccctctccacgcacacctcgccggagcagcacagccgccgcatccttgccattccctgcttcggtccaacaccatggcactcacgaacgacagagaaaagctatgtagagcgtcaacttggcaaagttctagggcgaagtagaaaaatgcctctgatcttgttagggaagatattttgttcttttcgaaaagagggtgctgccgtagaatttcatggtcccattgttttatgcagctagcacagagttatggtttcgagaattgcactcaataattcagatgtggctaatgttagttatttcagcactgtcttggttacattgacaatgtgatctgactgactacatgtttttagcggatacacagttaaaaacgttagctttggaaggccatcagagaccccaggagggtcggaattcggatctccgacccgtattttccttctccgctgccatggcagtccttgcttgctctccctttacagctttctttcctcatagtggactccggactccatgccaccgccatcgctgccgcctgccgcacgcaccaatatgcatgtgtgctgatgtgtgcaaggagaccgtgataattgtcggctcatctgatccgtatactccgaatcgaacggccaacggggtttggagttttaatcctcgaaccccctcgggcttagcacgactggagaaagtgtgtgattggttaaaaagagaaagtaggtgaaaaataagggttgtgattggttgagagtaggaggtagagaaatagcttcattttaggacaaggtgctgtactagaaatacctacattttataatggaggaagtagtagacagaccaggccacatcctcctcttctttcggtctttcatacctgcgtcagaaaactgaacagttggccctgaaagttcagttaggcccaggaggtaatccgcgaattctcttcagatttcagcgccggcgcccggcgggcgtggcgtgcacgacgaggagcggccgcgtccatgtctcagcctcgtcgacaccgcatgggtcggcggctcggcgccgccgcgcgagcgccacggcacggcacggcacgagtccgtaacacgacgcgatccgcgcgcggccgtccgctgccgtccgcattttgcagatggagagggacgtgtacgtccgatccacgcgcgcgcgctagcttaatttcaacaggtcggcgcgcgccgcgcaacggatcgacgccgcgtccccgtccgtctctcccttcccatctcctgctgcagcacgcctgcaccgcccgcacgccatcgtcgtctccgcgaaggcgattatcgttggaaaccgggaacagcgcaatggtgtgtttgtttttgttgtctatcgtctctcgtggagtcgtggtcgtgctatgcagaaggagcatctttctcccacgcatatgaccactagtggagaaaccctttgtagtcccggttcgtaacccccctttagttccggtttccaaaccgggagtaccaatccgggactaaagatcgctatctttagtcccgggtgaaataaccgggagtaaagatcgatctttagtcccggttggtaacaccaaccggctgagccatctttagtcccggttggtgttaccaaccgggactaaagatagagctgacctttttttttttgcatgcccctgttgctgcatggtttatatatatatatatatatatatatatatatatatatatatatatatatatatatatataaaccatgcatatatatgtttcaatacatatatatgcatacatatatatatgtatttatacatatatatgttatgcaaatgcatatgtatatagatatatatatatgaacaaaatatatttacattatagaaaatgtgtacacatgcatatagaaacatatgtagtcatgtattaattacaatccattatatatcctagctagctacgatttcgacgtagtagtactcgctgctagctcagaagctaaggaccggtgaattgtgtttccgtcgtagtagaattcacccttgggatcaaggatttcttcgttgatgaatcccatgagttgttcttgaaccgccgcgataaattccttgtgtgtggtcaggttatccctcatgcgaataaactatatgaatgtatgaaattgattagtaattaaacaagaaatcgctacgtaatgaaattttgaatttatttgtacgtacatcgagctctcttgtggtgatgatttggtctgcaaggcagtggcaatactcgcacacgtaatagccgcacaagttagttccctgcttttgctttgcgcactacaaataaatgacaaacaacgagagatctaattaatatacacttgtatgtatttgaatcggagaaatataaatgtagagcatgtgtactcacaggaaatttgaacttccgcctaagtctttctctccatttgccgcggaccaaatgacggaaccgataccaagccctacatggagtttaaagctatgattcgtagtagcaattaacataacaagattttcttaattaacaaaggaacttatgacggtacctgtctataagttcgaaaaccttgtcaaacgtagactcttttttatccattgagtcatatacgttgacggtgcaggcctccaggtcgatgagtaaaagcacccagtggaatctgcaatgtgcgtgggatgcattacatatgaaacacttagcaagttcgtacgggaatgaaatttggtatgtaggaagacagtaaaattaaactaactctgtgttgtatggcaacagtatgaacgtcttgtaatgctgcgccttcaggagatggacgagattgtcctctgtttcttgtggatattggtcgagcattgcgacgtttactttccgagggtcgatgaatccagtatcgaaaaccctccgccgtcgggccctttgaatctccattctacaacgataaaagggagtatattattttctatggtctacttatatacaaggacctaattaattaaaggagacgtatagtaagaaatctaactgaacgatatacttacaaaatccagcaactcataatagagacgtcgagggcgtccagctggtatagttcgtagattcccctgaaattgatccagagaatgtcatctccttgcaagaagtccgtgtccctgatcctcgctccgatcatctctctaccggtggcgctcatctccatgtacagctgatggaacttgtacatttgtgtgggtagggactgcagcagctttaccgagttcgtacatgtatttcacttccgccttttcgattggtgcgactcctagcaattgatccgtagttagaccggtgtcagtaataaattgttctatcgtcatttctttaccggtcaccaacggctcgatctcctggtttggttgctctccaagctgagggactggtttggactttccagaagatgctttcttcagcgttcgctcatagtccgatagcttgatggcctccttgacagatgcaaacatacccctgaagaagttcctgacactggggtctataggaatcttcttttctggacttcgaggcttgaattgtctcttgacttctgatgcaacgtaagcgtcaagctcctcttgcgtgcaatcgtaccccgggtccttgttcttggcggcgtcaactttcgccttctttgttgcccttatgtgggcaagcggtggagctggggggcccttgactttgaaggtgccggaagaggagcttgcgggggagtaggtgtaggagcacgaggaggagtcggtgcaggatcctgaggagtcgatgctggagcctgaggtggagacggtgctggcggagcatgaggaggagacggtgcaggatcctgaggaggagatggcggagccggaggagatggtgcacgagacgccgcttgtcgcccagggaggatgatgtaccgcctgcgccatagaataatggcatggcatgtgtctcgtagatgcgtctcaccgtctcctccagggtaatccagctcgaggttctcgtacgcgccttcgaccaactcaacttcgaccttggagtatcctgctggaatcggcctgcagtggtaagtacctgaagggtccgttgggatggccatgcccgacgccaccttcatgttgtgagagattatttattagtaatcaacatatataagcagcaactagcggaatggctaaatcttacctttattgataagttcttcaaaggaatatgcagctcacatggtgtccgctgagtgatgtcatcaacgggacaggtcgattcgtcctgtgtttgcatggcgtccatgctctgtgatcctacctgccccgttgaggcgcagctgctacggtttcctgacgggctcaccattgcaggaggaatggtcggctggggatcatgggaccgatgtgcggccatgcgttcatcaaccttccttgccacctcctcttgcatgttgagttcgtagctcgatacccggaactctaggtctgcaatcttcgcctcggtatctctcttgctcctcatccgactcctgtacgtgtggatgtcctccttgaaaccaatcttccaaggaatcacccctttccctcgagttcgtcctggatgctctggagtctgcagggcgagtgtcagctcgtccctatctctgtctggtcggaacgtgccctgagaggaggcttccactgcatctgttagtcgtcgcgcagcctcttgtatctgatagccgaagaccagtgagccatcagctgggttgagcgttccaccgtgagcatagtaccagaacttcgatcgttccggccaattggctgttgccggttcaatacccctctcaatcaagctagcctccatctgctcccacttcggcatcgcgacgctatagcctcctgaccccaagtggtgatggtacttcttcttggcggcattttctttgtttctttccatcatcgccttcccttgttcacctgtcttatatgcaacgaactcgtcccagtgatcccttagctttgggaatgtgtcgaagttcggtgtctgccccttcagtatatacttctggtacagatctcccttgaagctctgaaactgttctgccattttcttcagagtccaccttttcactttgtcctctgtacccgcaggaagggtgaatgtctcgagcattgtggtccacagcatctctttctccgaatctgggacaaagctctcatgatctccgcgtgcccttgttcttcgccagtacaccgtactgacaggcacgttatcccgcacaacccaaccgctgtgacgtacatagttcttggcggcttcggccggggcactaggacgtccatcttcttccacttccgttatgatgtgccgaccctcaagcttcttcgctgcacctcgttgcccgcgtgccctcttctgtccaacggagggttgactaccactagcctcctcctcctggttcccctccacatccctttccacgtgcccctgctggttcccctccgcatccctctccacgttcccttcctcgttcaagtactggtttggatcctcgttcccctcttcttcattccagtactggctgcttccctccgcgattgtatcgtacaatatctgttcctcatcgcggtcagccatctgttgatacaagaaacatctgctaagtcacgagacatttatgttttaacaatctaagtcatgtatgctaagtgtaaatgtcgtacattagaaccctacacaaccttacgtgctaagtctaattacaaatcgtgatataagctaagtctaggtgacgtatattatacaaccctagctagtaaataattatatactaagtctaattacaaataaaataatcttatattaaaactcaaataatattacatgctaatactaaaatagtcatgtatatgctaagtgtttcgtgcgtatatgctaagtctaattaagactacaatagtcaattgctacttgtcgcaccaattccgtagtcaataattacataccaagtctaattacaaataaagtaatattatattaaaactcaaataatattacatgctaagactaaaatagtaatgtatgctaagtgtttcgtgcgtatatgctaagtctaattaagactacaatagtcaattcctaggagtcgcaccaattccgtagtcaataatgtcatactaagtctaatttgcaataaaataatcttatattaaaactcaaataatattagaacactacacaatcttatatgataagtctaattacaggtctaataatcttaattaattgcattacaaatataacaatcatttatattattacgtcacttgcctgctccaattccttctagggctagctcttccactcaggcttgacggacgactccgacaacacgtcttttctgcaagataaaaaaaatgtattaggataaatgcaaagtaacatatatatatatatatatatatatatatatatatacatatatatatatatatatatacatgtatatatatatatatatacatgtatatatatatacatgtatatatatatacatgtatatatatatacatgtatatatatatacatgtatatatatatacatgtatatatatacatgtatatatatatatatgtatatatatatatatatatattgcatttcacgttaacgttcgtcctcgttcgttcgctcgttcacgttccctagctcgttcacgttcgttcgatcgttctcgttctcgttcacgttgtcgcggcaacgtacgttgacgtgttcgttctcgctctcgttcgttcgatcgttctcgttctcgttcgttaatggcggtgtggcggcatcggggaggcggttggcgcggcggcgtggcgacggcggcggcgaaggcggcggcggcgtggcgttggcatgcggcggcggcgttgcgcggcgtcgaaggcggcggcgtcgaaggcgacggagagagatcaagatcggagagatcgagatgcatgaagggagatgcggcggctctcaccccagagatgcggcggcagcagaggaggcggaggcggcggcgaggacgacgagctcgagacgacggcgagatacggcggcgtcggcgcggggatttgccctaggcagtggcggcgaaggagagaggccgagagagatcgatcggccgaaaacgtttaagtgttggtgaagaagacgagggcgcaccgggaatatatatacccctggatctttactcccggttgttgagaacaaccgggagtaaagaaaagatctttagtcccggttgttctcaacaaccgggagtaaatatcttttcccgctatttcgaaattctttttaaacccggttagggttaagaaccgggactaaagattatagcactgcatatgattttcgcttacatatgtgtttataaaatagaagttaatgcattaacattatttaaagtacaaagattgatgacaattacttcgaaaaattatttttgtctgtaataaattaagtggataaatcgtaataagcaaatatatgacttataattaataaaaattccaatatatatatattcttagcatatatatgaatgatattattatattggtaaaaactctaattaagatattaatgtacatactgcatgatttaaaattaataaaaattgtaatcatcatatgtacttagcgtaggaattatattaaattaaatgctaaaaactctaattaacatatgtaaatgccacatgcatgatttaaaccttttaaaaatttgaatagtcatatataagtagcatatgaaagatagtaaattaaattgtgaaaaactctaatatatgaatgatagttttaaaaatatattaaatttaatacttttaaaaattctccagtcaattataattagcatatgaatgatagtaaattaaatgttaaaaactctaattaacatatgaaattgccacttgcgtgatttaaaacttttaaaaatcctctagtcaattataattagcatatgaatgctagtaaattaaatgttaaaaactctaattaacatacatatgaaattgccacctgtgtgatttaaaacttttaaaaattgtaagtatcacatataactaacatatacatgatttaaacttgttgaaacctctaataatcgtgcgtaattaacatatgccatacatcaattgatttatatggataatcaatacatccaaaatagtttacatcgtgtacacaataattacggcattacatcagcggtgacggttgaccgcacgtactttctcctcactattgttccctccttgtgatcgctgcgtgagtaaggggtgtcttcatttgataggaggatgctagggtcaatcgtcaccgtgaaagggggttgcccatccaactgatcgtaatcctcgtcagtcttgtcctcaactccgacgatttttcttttgcctgggagaaccacttgacgcttaggctcatcaggccctctgcccttctttcctttgctagacatgtccttcacgaaaaagacttgcgttacatcattggcaaggacaaaaggttcgtccgagtatccaaccttgttaaggtcaacagttgtcatcccactgtcatcaatcattacgcctccaccagtcaacctaacccattggcaccggaacagaggaaccttgagaggaccatagtcaagttcccatatgtcctcgatggcaccgtaatacgtggcagttgttccatcgtgtcccatggcatcgacacgaacaacgctgttttggttcgtgctcttcatgtcttgggctctcgtgtagaatgtgtacccattgatctcatatccctggaatgtcgcgatcgacccagacggtcccctcgccaggaaggcaagttgttggttgatcgactcgttacccatgagatgttgtcgtagccacgcggggaaagtatcaatgtgatgccgtgtaatccatgcatcggacttaccgatgttcttggcgcgaactagagccaagtgctcctcgatgtaaggagctaccaatgaagagtgttgcagaacagtgaaatgggctttacggaataaattgttgtctaccgtcattattgctttccttccgagagttccctttccccgtagtctcccttcatggcgtgattcaggtaccccgattgggcgaaggtcttcgataaattctacgcaaaattcgatgacctcctctgttccataacccttggcgatgcttgcctctggacgagcacggttacgaacatacttcttcagaacgcccatgtacctctcgaaaggaaacatgttgtgtaggtacataggcccgagaatacggatctctttcacaaggtgacaaagcagatgcgtcattatattgaaaaatgatggtggaaatatcaactcaaaactgacgagacattgcaccacttcattctgaagggcttctaatctatccggatcgatgaccttctgcgaaattgcgttcatgaatgcacatagctttgttattgttgcccggacattgtctggaaggataccccttattacaactggtagcagttgtgtcatcaacatgtgacagtcatgagactttaggtttgtgaacttcttctccttcgtgcttattattcgcttgatattcgtggagtatccagacggtacctttatgctctccaagcattcaaacatactttccttctctgccttgctaagagtgtagctggctggactcaagtaatggcttcctttctcctttggttccgggtgaaggtcgccgtgttgttccatatgcttcagatcattacgtgcttccagtgtatctttcgactttccgtatacacctaggaagccaagaaggtttacgcaaaggttcttagtgaggtgcatcacgtcgattgcgtggcgtacgtccaagaattcccaatatggtaactcccaaaatatagagttctttttccacatcgccgcgtgaccatcttcgctctctatatgctggcttccaggcccctttccgaacactactttaagatctttaaccatagctaacactgttttcccgctgcgatgtttaggcttcgtacggtggtcggccttatgttcgaagtgcttgcctttcttccgtaccgggtggtttgctgcaaggaatcgacgatgacccatgtatacaaccttcctacagtgcttaagatacgtactttctgtttcatccatacagtgagtgcaagccttgtaccccttgttggactgtccggataggttgctaagtgcaggccaatcgttgatggttacgaacagcagcgctcgtaggttaaactcctcctgtttgtcctcgtcccacacggggacaccttccttcttccacaactgtttaagatcttcgaccagtggtcttaggtacacgtcgatgtcgttaccaggttgcttggggccttgaataataatcggcatcattatgtacttcctcttcatgcatagccaggggggaggttgtagatacacatcgtaacgggccaagtgctatggccgctgctcatctctccaaaaggattcatgccatccgtactcaaaccaaaccgtatgtttcgtgcgtcctttccaaattctttaaattttctgtcgatgtttcgccactgcgaaccatcggcggggtgtctcagcatcccgtcctgttgacgctcttcagcgtgccatcgcaacattctagcattccccttgttcctgaacaaacgccttagccgtggtattatagggaaataccacatcaccttagcaggaattctcttctttgttagctgcccgtcaacttctcctggatcgtcccgtctaatcttgtatcgtagtgctttgcaaacagggcatgcttctaggttctcatactcctcaccgcgatataggatacaatcgttcggacatgcgtgaatcttatgaacttccagtcctaacgggcagactatcttcttagcctcgtacgttgtctcgggcaatttgtttccccccggaagaatgttcttgacgagtttcaataaatcgccaaatgccttgtcactaaccccattttttgccttccattgcaacaactccagagtggtatccaactttttgtgcccctgctcgcaacctgggtacaacgaagttctgtggtcctccaacatcttgtccaatttatgggcctccttttcactttcgcagtcttccctggcgtcctgcaacatctgaccaagatcatccgcaacgtcgttaccatcagcagctatttcctcctcgcccgtttgatttccttcaaatccaacatactgagcaaagtccggaatattgtcgtcttccacttcatcttcttccatttcaacaccttgctctccgtgggatgtccaacaattatagcttggcatgaaccccgactcaaacaagtggaaatgaatagtcctggatgcagaatactccttctgattcttacacttattgcatggacaacaaataaaacccctttgcctgttagcttcggccactctcaaaaaatagtgcacgccgtcaataaactctttggaccgccggtcagcgtacatccattgccgatccatctacatgagtcaaaaaaaccgcacacaaataattattcttacaataatgacagtcatacaataattataagatatctttattcatacaaaaatcataaaatattacaccaaataattcttaaaaactatttgtaaagttttaaactaattttaatgtgttttacttcttttaatttttattttagtttgttttctattatttaatattaactttcactagagttttccttctcaactattttataaaaccttgtttagcaaatgaactaaatttctatatattctttcttccccacacacattttctctctcatcaaattacaactaaattttggagacaaaaaaagtgtgcaaaacataggtgcaaatgtagtatgacaaaaaaaaacattagaggatgaagttgcaaaccttttaggcacctccgatttgtatgtaatcaccaaaataaattcaatagaaattttggcatgacctcccctcttttttgaagaaattttgaagattgctcgggcagctggaggaggaagaagacatatatataggggtgggactttagtcccggttggtagcaccaaccggggctaaagatcaccgggatcattagtcccggttggtattaccaaccgggactaaagttaagatctttagtcccggttggtgctaccaaccgggactaaagatcccgggggggcctgacaggtcctgacagcattcgaacccgggactaaagatcaaatatgcccgttacccttttgaaccgggactaaagatcatctttagccccggtttttattgcatccgggactattgtggaaatcggccgaccgacgaaagatggtttctccaccagtggacgcatcattgttcttgggtaaacactgatgtgtgtgtttattctcttgaacagtctctccaagaacaattattgccggcttctttatcactacgctatgcatgtttgaatgtaacgtgttaattaagttttttttttctcttcagcgttacactttcatgtattccctcacatggatgatggatgtatagcaaatctctctcactggcgctgcagaaactttggacttgacaagaagacagtgacaggtctccgttccaaaggatgcttccttgacagtgcactatactgatcaaccatgtgccctgcacatgcctcctctcaacggggcaaggcaggagcagcttattcaatgggggagcaactgttgattgagtaattgcaggggttgaaatgttgcgttgtgaggttatggattcttaagatgccatcaagaacagtactgtacctagctaattaagcggctgcatgcctgcatccatgtgccaacgcacacgtactgcgtgtgctccctagataaaactctggacttagtagtttgatcataacttgtcaggtgttatatacttaattatatgaacttcaggtctagttagcctcgtcttggggttcgtaatcggtataatgaaattttgttataattcaagaaatatcatcaacaagcctcacggttcaaaaaatatcattgacaaatccaacttcatggaaatgctatcatacaaacgcatttgtcccaaaagtactatcgccgttaggtctctattagtagatcctcgttaagtactgtaaaaagaccattttacccgtacgaattgttgaaaactcatcaaaacatttgctcttcgagtcaactaacaacagtttagtgcaaataacgacctagaaattagtctaagcttatgaaaagagcaaaatttttaatcatcttttagcaattcgtaggggtaaaatgatctttttatagcactcaacaaatgattgctaacggaaacctaacagcgatggtatttatgggataaagacatttgtacaatgacattaatttctaagaagttaaatttgtcgatgatatttctttggattggcgttcgcaaaaaaaatgtatttctttggattggaaagcttgtcgatggtatttttctggattttcccaaataagtaataatattgtctccggtattaaccccgaacgtcatagcagaaattccaaaaagactattaagaggtcagaaatcggaatcaaactctgcttgtgagcttgtaaattagccaaggaataattaaggtgctccgtcgtcaggtcatgcaattgtgcaacggctggtggagagaggaggtaattaactacgttaatactgtagctgacaattggcctatcgccctacggtgattaaaatttatatggcgtcaataatctcgccttgaccttgatcgacgggttcctgttatcctgtactccatgctatgctaatagcttggccaatcgtgcacatcgtacacccgttgggtgccgttttggataattaactagctgcacagtggcacacatgcatatgctaatggtctatttaaccacaacgtccatagccgctcgaccttgtactatctgtttgtccctgtctctgtctctcctttcgttactttcttgcaaacaatggacattcatatgatatatactcttagaaaaagctttttttttcatcaacgtgcaagtgtagtactcctatgtaaactaacaactaacacgcatgcatgcatgattggctaagctggggacattgagcttgaagccttggagaagatgaaaggagagggaggacagggaggcagatgggcacacttcatggcgtcccatgaccctttaccgggcaaactgtacgacggcgaccggcgctagctgagctgagctgcggctgcaatggcatggcgtgaccacgacgtcgaaccggccgcccggcccagcacagcgcggcagtagcagcaaccacacctaaaaaattttgcttgattgatgtggctgcacctgcacaagcatgcaggaggcagcttccggccgaaatttagagcaggtacattagccagctataaatatattttaataagataaaagataagagaaaagagcagccggctataggctttagtcagctgcagcacggactttaagacgcaatatgtgcatgacaggtggaaccatatattaatagtataataaataactattgtataaattaattattagatcggatatagataaattggagctggtattaactggattggagctgccgttcaccgcgcggttttttacttgccgcccggacttcgaagcagatcgatcgatcatgagctggtgattggcacaagtactagttctttttttttcctcttcattttttttttggcgctgattccgtctctagagtactactcctagaggcaagaaaaagttctgttgggagttgcagtaaaaatgaagtgactccatctataaaaataaaataaaataatgaagtgacttgagaaaggaggccggaatgcattttgtcatgtcttattgattatttggctttaatttgaagccttagaaaaacaaatgaggcaaagaaaaataatgtcaggataggacttaaaaatcatgattttaaaaaaacaaaacgataaaaaaaggtctagcagaatttagattttggttacggcttacaatttttttttctatcctagcccagggtgggaatttgttggaatgtttttttttcttaattaatgctgataacaataattcctagcccaaggaatttattcatgtgaaaataatgtacaattaggccctgggctgtttcaggaacgtgttgaaaataatgtacagttccagatgtttcaactttcaagttagattcaaattcctagcccaaggaatatctaatctaacgtggctacgtagaaattgacatcgtcaagctccaaaaatggtaaacttggtgattctggtcggctaataattgagacagagagcaacaacatcaacaaggcattcttttgtttttcttaaaaagaaaaatcatattcagggacccaaaactatagacaagatcattgcatttgggattaacaaaagcaatagaaaaataaaatcagggaaggtgatgaggaggccaacctttaatacagtcgagccaccagtttcctgccctcctcctcgcatccatttctgcagcacattgctgaaccccaccacgaacagctcaagtacacagtcacgagaactcgtggaaaaaccgggctaaatccaacgcctctcctgagtagaaaaccgctaccgctcggcatcttccttcttgtttgattcgtgagcagttgggttcagccttccgggctcagttcagtctggtgagatttctcttctcctgcctttttctcttcttctggtgcccaattcggttcttcagagaatcctctgctttggccctgtagatctgccttggcttgatcgtagtaaaccttttcctctctgtttttatctttcttgcaaagaatgtaagatttcagtctgctgcattttgcagagagacgagaaaagggctttccttttggcgtgttcttgattcttgctttcctcacctttctgcgctcacaaatgacatgttgacattttactggaacgaggtaggccgattgatatgtgctaccactttgtttatgcaacctctcggaaggaatacatcaacaggcacagcttttgctcaactagagtgatgctgtttaatttagaagaaagaaaaggctccatttgccatttctctcttttttttggtggcccctttcatgtgctctcatctgatcaaacacttgtttattgtgaaagggaacgctagatctgtagtgtgttgcatgattattggccttagtggagggttaggcaggattgatggttttaatgccataggaaggagctctccatggctttagctttcgtagttaagcagacaaattcctgtgtgtggcacacaatagtgttaagtgtccatttgaggggaggttgatggagaagggtgtggactgtggaggccatttcttgatgtttagttttcttgactgaaaccaaaccattgattgacttgcctacttttaaatatcttaatcaggtaattagtttgttgttggccactacatctcttttgtttgtttggtgaatctttacctcctagtccaatcatggaatgatagttggtttcatgaatgcacctttgaatttatcagatttttttttctcctttgcagatgtgaatggaagtttcatcactattccaaggttgctattttgattaactatagcttgtggcagtatttggccatcttgcctgataaataaccagtcatggcgacaacggcttcaaagataattcctcaaaccctcccagaaatcccaaccaccccagaaccacagcagtatactaagactgctccagacatccccaaatcaaacaattctcgttcttcagtacctaaattgctacaagaatcagaccgcggcaagttgaatcataaattggagccaaaggaacaaaagccaaaccaccacctgaaagagtctgttgatgtttcatcggccaagtgtccgacagaagtgagcgaagaaatggtttcagaaggtattgcaagtcaagaaaagaaggttgtggagtatgagagtgtgaatgggagctccacctcatttcacacatgcgaagggagtggtccaggaaaagcaagtggaagtgctaggatgacggatcgatccgagaccggtgaaaggggtagtagtagcagatgcaggccaagcacaagcagtgatatcagtgatgagagttcgtgtagcagcatgagcagcaccacgaagcctcataagtcaaatgattcacggtgggaggcgatccagacgatcagggtgagagatgggatcattgggttgagccatttcaggctgttgaagaagctaggctgtggtgatattggcagtgtatatctctctgaattgagcggggcgaaaagctatttcgcgatgaagattatggataaggcttcattagcaagccgcaagaagttgcttcgagctcaaactgagaaagaaattctgcaatgcctggatcacccctttcttcctacattgtacactcacttcgagactgacaagttctcatgcctggtgatggagttctgcccaggaggagacctgcatacccttaggcagaggcagccgggcaaatattttccagagcaagctgtcaagtatgtcttttcaccatttctttcaaaaatctgtttatctccattttaccttctgcatgtacttcaccacctaacagaaatggtgattttcttaaaatttgttcatgtgaaatcagtagtgacaaatggcaagtctagcttactataatttatgaccttttgccttctactgtcttaggagccttactaataaaatgctgcattgctgtcatattacagattctatgtagcagaaatcctcttggcattagagtacctgcacatgctcggcatcatataccgtgatctcaagccagaaaacgtcctcgttcgggaggatgggcacatcatgctatctgactttgacctctcactccgttgcgcggtgagtccaacactaataaaatcatccaacccggacgctgaagcactcaggaagaacagccaaggttactgtgtccagccagcatgcgtcgagccatcctgcgtgattcagccatcatgtgcagcccctacaacctgctttggccctcgattcttctccaaatccaagaaagatcgcaaaccgaagcctgaaattgcgacccagatcagcccttggccggagctcatagcggagcccagcgatgctcgttcaatgtcatttgttggaacacatgagtacttggccccagagatcatcaaaggcgagggccatggtagcgctgtcgattggtggaccttcgggatattcttgtatgaacttctgtttggaaagacaccattcaagggctctggcaacagggcaacactgttcaatgtcattggtcagccattgcgcttcccggagtacccaattgtcagcttctcagcaagagatttgataagaggtctacttgtgaaggagccccagcatcggttagcttacaaacgcggcgccacagagataaagcagcatccgttcttcgaaggcgtaaactgggcgttgatccgatgtgcaagcccaccggaggtaccaaagcctgtcgagattgagaggccaccaaagttgcccccatccacatctggaactactgatgtgtccagtggtgcgcctcagaagggttctgatggctacttagagtttgattttttctgatgaacatatggatttcgatatatatcgattgtgcgatgagatgtagttttctttaggtgtagtgtttctggcagatgataagtgttgtagactgtccactgcaacctgtttctgttatttcctgcataatctatattcttttacagcttgtgtttccacaagttctgattctgttaatcttctggccaagcagtatgccaaagttgcatgtgatccattattatcccagttcagtccaattcagggggttcatgatgccatgtgattgctaaccaggccagtggccattctactgtaactatttgatgccttgatggccacatgccagaattacaacggcttgcactatatgtaaccaaaacatttaagctgaggatcacacttcaacacaaatggaaagttaaatcgtgggcacaccatatctctgaatgtttgccaccatcatttaagaatggctggcagttcagcacatgtatctgcgactgcaatatctgcagcagcaattgcttgccgcctccatttctgcttacacacatcctagcttggacggaccacagataccaatcgatcacgtatccatttcactatttcagcaaacgatgtactgcattgggcatgtgctctctcatctctacctgtgcagacgtgcagtctagttttctgttgtccacagctatttgctgtacagaggagatttctgagatcggaacggtgatgctttatagtatgagcctgtgataaataatgtactgtatttttttcttcactgcttcttcaccagcttagatttgtcctaatatttttttcttacttttatggacctaatatttctccgatcccaatccccttatttagcacagtatcttgccagtaaaatcaagcgctgtagaggcgtaccaggaagaagcagcagtgaagtagttgcatcgggcgtgctggtgagtggtgacgaagcggttatgtttggacctgaaacgctgtgttgccggagcgtcagtctccactccactctccagacgccgcagccacctccggtgcctttctgcgagaacaaagggggctaagaacagaattgccatgtagagaatacttgagatcctcttaatattgtgatcagagccaccacggggtccacggcaaattgaaaatgaaatatttattaccatataaatggagtgctcaaaacattcaacaacaggagcagcaaccagcgacaaaaatacaagctgaccattttctgaatagcatgcatccacatgctgaagaacacctccagttcaaaataaagataacatcgtcatgtcgaacagcagggtcactgccttgcgaaggtaaacaaataggcaaggcgtgggaaaacttggagattaagcagagtttcacatgaggacgacattacccaaaacaactttggtcactttcttcagattagctactttaaagttctaatcttgcattactatgcacacgtagtatattattctcacagcagactgttttacagcagtagactgtccttagtgcacaaaacctagccctgttctgaggattctcaattgaggttcttgtagatcctgaaagcgacgaacaccgatgcagcagctgcaacaataccaagagcagcataggtgtcagccgtttcccatgtctcaaaccaggttggcatggaacacatcttcatgtgcctcttcttgctgccagcagcacactctttgtcagcccccttctcggagctcttctggttctgctcagctgtgatgctcttatcctcctttggcagatcactctggcagcaggtaaagcctccattgccctggcagcaaccacctgcagcgacagggttgcaagcagaaccgttggtagtttcttcaggggattcatgggcaccatcctcggtcacaccatttgtcacgtgtttagactccagggctttcctctgctcttcttcagacaaacccatctgacccctgcaaaataggatgatacatataagaaccacaaagagaaggatcacttgaacatacttgacatattgggttttgcataatatatggaaagcaagattacaagtttttgttaatgattagaatgagaattgtgattctttgaggcggaaaagaataaccacataaaagttatttccttatttcagaggttgccacaattaaatctacagggagatttgtaaatgcaacaaatatagcaaaatatccttatccttgcgtatatttatagacaagatgtgagccgacaaacacataatataggcaccgatgcttcaaccatactcatttgagaaaaaaaaactcacatcaacaagggggtaatttgaacaaactagaaggcagaataaacaataatttggcgatggaatcaaacaaaaataagcattcctgaatgaataacaattcagctggatgaagtcaaagtcaactctacatcagagttcatctccacacatgcttgtagcacatggttttggcctactttattataatgctcaagaaaatttcaaatggagacttctgatacggtatcgtatctcccttaaataataaaataataataattttgaagattgtgaggggcacttgaagttaaccatttttttatataagataaaaaaataaatgctgcaagacgtacaaccaaagtatcaaactagaacaacaaagcagattttgtacagtgtttagactattagtcatagatgctgacatgctgtgatgtgcgtttgcataagcatatcatgtgacatgcatgctgataacaacagcaagagaaagatgtaaattgaaatgttgacagtcctaaatggcaccacacagcacaagatacaaatgattggtagaactaatatcaaccttgttgacatcagcctgtgatttaagtacaagagggtacctccatagatggtccacgatctctccttgtccaatatgtttatgtagcaagacaggcacatcatcaggagaaacataaccatacctacaaatgcaatttaggtaagcaagcactgagttatagtgcatataattaaaatgaggagctacattagagcattaagttcaatggtgcatacaaatttaattacactttcgttcttaccaatgaccagtcacttctcccttggcatctgcactgaaaacaatgacatttcctgcatacttatggcctcccacatgtgagcatgcactgactgacacctgatcagcaaggccttgtacacctatctcttccttgaacctcttaatcaaagcaggtccacagacaccacacctcttatccctgcttgcatggcagcaaacaaaaacataggaaccttttatagcctcaggagatccaggaagccattcagtatctttcacaagcacttcttgaacaaagttgtcaacatcaaagtgggtcagccctctgcaaacattacatgacaaattgaatagagataatcaactggcttatttatcagaatatctaacacaagaagaaagattgtatgtttattttgtttggggattagaacttacctgtatctgatcatatctggaaagatcaacacgtctccattggatgactcagtgccatcttctccttcacaaatggtcaatttggtctgaggaatgaatacaccactcattagcaagaaaaataccaattagaaatacttccaatcctagaattttcttcataactaatgagaatgaagctagcataaggccaggtaataagcaactgtaggttggttgataatactgagtaatgccatacccccaattctaacaaacaataaatactgcctcctctataacctggcaacacaggggcgaatactctcttaggacaaaacaacagccaaaagcattttgctgcactttcggtaactctgtaactgcaatactatatgataccactgaatcaccgtttattttagtaagcacagccacaatatacacaaacagaataagtaaaatcctgaaaatgtccaaactcccaaaacacaattcacatgtccaactgaaatagccctaaccttaaaggagaataccgataaccacatcgttaaccaaaacacaataatagaaatggtaacaagtgacacgaggaccatatagcataaactgacatgaaacatcagcttatgaacagcactgcaccttggatcactgcaacgtcaacaagctctacttctcaatttacaatcacaggcaggtaacaattaaaccatctggcaaaacacccatcaaatcgaccaatttgttagcaagggctaaaacctcgtacacgaaatatcacctcatcatatgctgccacctgacaagcaaaatcacactactccacatgatagttcaagctaatcgaactctattggcgagcacaatcctagggttgggccaaaaccaccaagcagttcccactacacaccgatctaagtaaaaaaaaacacctaccacaatcaagaatacgacatgaaagcaccgaatcagcttatctcagcccccaaaaaagggggagggggtgaagaaacactcactttcttcttcaagtccgacttgtgggtcttgatggcggcggcgaggaggcgggggaggcggtcagactccgcggcctcgacgtgggacggccacacctcgggccccttgtagcagaggaagacgtggcgctcgtggaactgcaccgtgccggccagcttctccgtcccgagctccgcgcgctggaacccgaactccgcgtccgcatcggccgccacggcgagggcggtcgcgtccggcgcgtcaccgggcgccgccgccgccgccaggagggcgtcgccggcggcggccgcggtgggggaggatctggaagggtcggccatgtggctacggcgacgtgcgtgctgcgaagggaggaagagcagttgaaatggaaatcgcttcgggagcttggggaaaatggcgagcattcttttttttttctctcggggtttttattgctcgagatgttcttgcgagaggggaaagagtgatcccacgtatagggtcccacttgtcagtgacgttttgcgtttgaattctgttgctttctttttggcgagagcggggcccacaagaggagggcgattgatgtcaactaggagcgcgtgtcacactgtcagtccagtgggccacacctgtcagtaagattccgtggacgaataagttcactttgactcccttaactattggccaaatctaattcgtatccttgaagaacaatactggatatctcgaccctcaactattaaaatcagtgtaatttgactccctcaacgattttggatggcagtttcactaacgtggtaactacgagacggtgtttgacctggtctttatcctacatggcaccgccgccggctaccgtcgccgggagagcttgtagtagggagagacgggggagatgtgaagctggccgagacttggtcaacatagcggtggcatcacgtaggacgaagactaagtcaacaccaccacgtagtcgccacatcagcgaaaccatcctccaaaatcatcgaggaagtcaaatgtgcaccggttttaatagttgggggtcgatatatcgatattatggtttgggatacgaatcagattccaccactagctatgggagtaatattgaacttatttcattccgtgtagtactacctcacggcctaataaacaaaaaggcccaataattgcagccagcccacaaaagtgtcgcataaaaaagccaagcccgcgactggcaaagcggataagccccccgcgcccgcacacaaccgcaccgccatttcgcggttccgccatggccaccgccgcggcgctcgcgctccacacgcagttccggccgccgcgctcgcctcgccgtctccggcagcatctagccttaccctcaggagtcctcatccgatcccccgtccgcgcctcggctgcgtcggcgtcggcgtcggcgccggcgcagcgggaggccgccgccgcgggagtcccgtggggctgcgagatcgagtccctggagagcgccgtgtcgctggagaggtggctcaccgattcggggctccccgagcagaggttggggatacagcgggtggacgtcggtgagcgcggcctcgtcgcgctgaagaacatccgcaagggggagaagctgctcttcgtgcctccctccctcgtcattacagctgactcagtaagaaagccctagcctccctctcactagtcactacccccgctcgttgatagctttaatggtggatttcaggtgcttcatgtgatgaatttactgtcaatttggtgatttttgttgtgcttcttgtataggaatggggctgccctgaggtggggaatgtgttgaagagaaattctgtgccggattggccgcttattgctacctaccttataagcgaagctagtttagagagttcgtcgaggtggagcagctacatagcggcgttgccaaggcagccttactctctgttgtactggtatagcctgacgattattgttgatgggggaagttcggtggggcttggagattgcattctcaatcttgtacagcctttatttgttgttgcaggactaggcctgagcttgatgcatacttggtggcttcgccgatcagggaacgcgcaattcagaggatcactgatgtggtcggaacgtatgttttttctttctttctgctgtagtcctgatggtcatttagccttaattgtaaaatcttactctgttggttttggcagatacaatgatctccgtgacagaatattttctaagcattcagatttgttccctgaggaggtatgtttcacaaaagttagtatgttctttgttgagactaatgacacaagaggcctttccgacctagattctactttttaagtctcagcaagttaaaatatataacaaggctaaggattatatcattctttagctttcagtactaacacaaagatgtgaaagtggtctacatactacgcactaagaaatgtactggttcactcacatgagagatatcacatattacttctaaaatatcatgtgtttttagtgtaacctggttggtttatctaatataacttaactttactattttaggtttacaacttagagacgtttagatggtccttcggcatcctcttctcacgcctggtaagctaaagtactatgaacttaccaaatgcagtaaaaacattttttttacttccaccatgtattctccagttacctgttttgttacaaaattgaaggcttttgcattgcttgctgttgatgtcattctgctaaacaagaatgttcattggaatgatttgcaggttcgattgccatcaatggatggaagggttgcactagttccttgggcagatatgcttaaccatagtcctgaggttcgatttgtatgttagtaacaaagaatcattatgaatagtgcacagaattccttaagcactctgtctcccatagttttcattacttgtacaatttcataggtcttcatgacattcttattgttagagattacttcataagttttttgcaaaataaattttcaggtggaaacattcttggattatgataaatcctcagggggaatagttttcactaccgatcgttcatatcaaccaggtgagcaggtaacgcttttcatttatgctttagccctatattgctgtttcaagattggggatttttaacttaaccttgtgaatatgatagcaattttttttactgtttcattcaacttactttacgtcaaaaaaaaattattacgtcaaaaaaaattcaacttactaggatccttgttttctaccaatagattggtatctctgcctattactacctccggtcacaaataagtgtcattctagacagcaacacagtcaccattacagttgttttatacaaattactagtataaaactcataaaatatatatcaaagttataatatttggaaactattttttgaagatgaatctaaccatatcactttcaaaagttgaatcaagatatttaaagaaattgatggtgacgattaaagaaatatttaaagagaacatgttgactggacgcattccaaaacgttacttatttgtgaccagagggagtagtaagcaaatcatcttgaatcttgacactagttttaggatgcgttcccaaaacatctggagttcatccattttataaattttgttttgtgcaaacatagcatactgtacttaagtgtgattcatggaacatttggatctgtcagccatccttttctttaaaatggagttaatgagatttttctgtgggttatgtctaggtgtagttatttcatgcagttaactcttaaacttatccgtttctaaaatatcctcttcaggtgtttatatcctatggcaagaaatccagtggcgagctattgctttcatatggttttgttccaaaagagggaacaaacccaaatgattcagttgaattgctggtgtctcttaataagtctgataagtgctacaaagagaagctacaagcactaaaaagaaatggattgtcagagtaagcgatcatatccttgcgtgctaacaactcatagtgagtgaaagaaaatgttctcttaactgtcgcgttgttgtgcctttatatcatcttgctaaaatgaacatccattagaccttaggctggagtattttgtggcatgtttgctctcttatcgccatttgaacatgccatcaagaacgaagtctgaaaacagtatttagttgtgtaactggtgtggtctgcagaagaaaaaaaaatgagtaaaatttcataaatattagaatatgcagtgttgtttcaactcccctgcgattatcttacagtgcacatctctgtcactatcaaatcgtacttttgctatcaatataagtggatctgatcactgattcattacttacaggtttgaaagtttccctttacgcgtcacaggatggccagttgagttgatggcttatgcctttcttgtggtcagccctcccgagatgagccaacgttttgaagaggtttgtcatttctgttttgcaccgatatttcgggatcttgttgactgaggtaaaactaggggtttgttgaagataaattgagcttacacttattctatatgagtgatctcccaaagcttatcctttcagatggctgtcgctgcatcaaataaaagtccatccaagcctggacttaattatcctgaactggaggaacaagctcttcagtttatcttggactgttgtgagtctaacatagcaaaatacacaaagttcctagaggtgagatcctttccatggaagatcttgcagaacttctagttaatttatcgtgatatttaaacagtacattatgcaaactagttctctgatgatcctatggatacttttgtgagtgctaacaaactaatgtacgccaatcaataatgtttcagggtagcagtgggtctctgcaactttcaaccaattcaaagcaagccaaccggacgttactgctaaaacaactagcaagagatctttgcattagtgaacggagaatcctgtatcgtacacaatatgtaagtcaataatgcatgctatattgttacttctctgtgttcatcatgtggttattcttaacttcttacaagttacaaccctcttttttcttacagatattgcgtaggagactgagggacatgagaggtggtgaacttaaagctctgtcattgttcaatgggctcagaaagctcttcaaataaaaggatggatttgtttttcaatgttagctgaagatttcgaggacaatgtttaatctctagtatcttggtaattctcaatatatctcatgttaagccactttcagctgttggataccatattactgactgggcactatattctgcagcttcttcctttcaggttgtctttgttgctgatgaagctcagactgttgaagaaaaggaaattgacaaatcagattacaatctcagccgacaagcaactgatgctagaagactagaagtggtcacagctcaatagaagacactagttgtaacttgcgattgaacagtccatatcttggtttaaatctactatagcaccatgcaacaatgtaccagtggagtcatctcgtgtatattttgtttcaggggtttcccctcgatatctatagcataatatcccttctatttctgctgttttcaccccaacttccatgcctgcaacgtccatttcatcatcttctcctgatgaacagtaatgctgctctactagacgtcaaactttgcagcgcagccgcgggtgggtgcaagccttggacgttcgcttgtgttgaccatctactaggctactcagtagtcagcagtagcactcacccactcctctgaagtcccagtgccatctgctccatacttcgcaggtaggagggagcatggcggggagcggcggcggcgtcgtctccggcggccgccagcgcgggcccccgctgttcgcgacggagaaaccggggcggatggcgatggcggcgtaccgggtgtccgcggccacggtcttcgcgggagttcttctgatatggctgtacagagccactcacctgcctcccggtggcggcgacggcgtgcggcggtgggcgtggctcgggatgctcgcggcggagctctggttcggcttctactgggtcctgacgctgtccgtgcggtggtgccccgtctaccgccgcaccttcaaagaccgcctcgctcaaaggtacctcccggctctcgatagtaccagcaactgctatcaaggttaatctgtgtcgcaattccttctccttgcttggtttgttctttcattggatatgtactgattatcctttgctcaaaaaagatatgtagtattgattacgtttgctcaaaaaggatatgtagaattgttgttgaaagacatgctatgatgctagaattttgattgcaaacagctacagtgaagacgagcttcccagtgtggacatttttgtctgtacagcggatccaacagcagagccaccgatgcttgtcatctccactgttttgtctgtcatggcttatgactacctgcctgagaagctgaacatctacttatctgatgatgctggttcggttttaacattctacgttctatgcgaggcatccgagtttgcaaagcattggattccattttgcaagaagtacaaggtggaacccagatcaccagctgcttactttgctaaagtagcttcccctcctgatgggtgtggacctaaagagtggtttaccatgaaggtagagttgaaactgttgtgatgtaatgtagttcatcttcaactaaattgctgttgtgcactattacttttttttcgccgggaaggccgaaggaggccatccaaatatattaagaaggagtaaaagttacaagaaaaaaaaaacatcacaatgcaccaaggtgcatgacctcacagcacgcactaccacccaagcacaaaccgctgagggtgaagcctagcaccaaatgacccccgctaagaatggccgaacgccgctaggcctacggcaacaccacagagacaagactccgaaaacgaagccaccacggtggtcacgacatccaggatgccgccatcgcccatctaaaaaagatgtggttttcacccagagaagcttatcgagaaaggaagagggtaacccttgacaacgccccaaggaggttacgacgcccgaagacatagccgctgccggcccagtgaattaccggactaggcttttgcctgggaccctacaaccttgactgtagatcgccgtccaccaactcagaaccactacacagacaaatggcaacacgtagcttccaccacaccgcactgacgcccctccatcgaccgacttcatcgaaccacaccgcactgacgcccctccgtcagccgacatcaaccaccgcccctgagagctggcccaggacccctccgttccaccacccgccggcctcctcgccagctttggacaaaaggagaaccgggactggatggcattgctttggcagcctgagtttcccccgcttgacgagctgccgcctcaatccaacatagaaactccccacagagaaggggaggagctccaggaagggcgagggtgccgaccggcaacggagaagacgacccaccgccgccagctccctttacactgccatctgggcttgcgccgacgccagagacgcttctgctgctccggctccggcgcaacccaccggcgcccccgtcgcccggccgccgcaccccatctggccgcgccgcatagcccacccggctgaggagggcaccgcggcgtcaccctggctgcccggctgccgaggcctgcctgcgccatgggggctcgccgccgcactgccgagccgcgcgagcccgggctgcccggaccggccgcgcgccgagctgccgccgccgctcccagccgccgccgcctctaggcagccgccatcccagccgtcgagccaccgccaccgcgcccaggctgccgcaccgggccagccgcgccgtccctgccgccgctgccgccgcccccccagccacctcgcgccgccgttgtgccagatccaggcgtggggtggtcggatccggccttggaggcgccggatctgctgcctccccacaccgcgccgccatcgccacctccggccgcggtggagggtcttcgccggcgtcgtcgtcccgtccacgtcacgccggggggagtcgccgggaggaagaacctcgccgccgccttccctgctcgctgccggctttgccgccggcgagctccggcggcggcgaggcggtggggagggagtggaggcgtgggcggctagggttttttcgccccctgagccacccgcgcgagagcgacgcgagaggttgttttcaggttatcaatttagtctgtgcactattactggcttccatttggtgcactactagtgatttacatgtctacttattacctttactttcttttttctgtgtttcaggaactgtacaaagacatgacagatcgtgtgaactcagtagtaaattcaggtaggatccccgaggttccacgatgccattccagaggcttctcacagtggaatgagaatttcacttctagtgatcacccttctatagttcaggtaaaagttatgtggtgatgaccaggttaacagatgaagaacatttaattgaattcaaaattcagaataatgagatgattagaaaattttaaaacaaagctggtgtgttggctctaatcataattgctaacatataagaatgtacatgcacaagaaactttaatgggatatgaaatttgtttttcttgtctgcaacatatttgtggattctgctgatcaaagtgttctccatggctagattttaatcgatagtaacaaacaaaaggcagttgatattgatggaaatgcattgccaacacttgtatatatggcacgtgagaagaaaccccagaaacagcatcacttcaaagctggatctttgaatgctttggtgggtcttttagccactctatggtccatgattttctaccgcaacaatttagagtcaaccttatcgtgtttctagaattccttaaattatggtcaatatttgcagataagggtatcatcagtgataagcaacagtccaatcatcatgaatgttgattgtgatatgtactcaaacaattcagagtccatcagagacgcattgtgttttttcctagatgaagagcaaggccaagatattggttttgtacagtatcctcagaattttgaaaatgtggtgcacaatgacatctatggccacccaatcaatgttgtcaacgaggtcagtagtaagatagcatagcatctcctgaaatttcagtggacatacttacacaattggacctaactttgtttgtgatttcattccgttgatcaccagttggatcatccttgcttggatggttggggtggaatgtgttactatggcactggatgcttccatcggagagaggccctatgtggacgaatctatagtcaagaatataaggaagattggactagggtagcagggagaacagaagatgctaatgagttggaagaaatgggcaggtcacttgtgacttgcacatatgagcataacaccatctggggaattgaggtatgttagtctcttacttcataccctgaacatgtaaactgttggattttatcctctatagccatcaaccagcaatgggcattcgcatagttacagaactttgttcattttgtactgattacagctactgacttcaagttgctgaattgcagaagggggttaggtatgggtgcccactggaggatgtaactacaggattacaaatccaatgccgtggatggagatcagtgtactacaaccccaaaagaaagggattcttaggcatgacacccacctcactaggccagatcctggtcctgtacaagagatggacagaagggttcctccaaatatccctctcacggtacagccccttcttattaggtcatgggaagatcaagctgggtcttcaaatgggctactctgtctgcggcttctgggccgtgaacagcttccccaccttgtactatgtcacaattccttctctttgcttcctcaatggcatctccctctttcctgaggtaagtttccatatgctttaacgtttgttcagacatttgtacgcacttggcttaaagtttaacacaagatttacatctgcaattaactcagaaaactagcccctggttcataccctttgcgtacgttatggtggccgcatactcctgcagcttagcagagtcactgcaatgtggtgacagtgcagtggagtggtggaatgcacagaggatgtggctcattagaaggatcacctcatacctcctggcaaccatcgacacattccgcagaatattgggcatctctgagtctggattcaacctgacagtgaaggtcactgacttgcaggccttggagaggtacaagaaggggatgatggaattcggatccttctcggcgatgtttgtaatccttacgacagttgcgctgctcaacctggcatgcatggtgttaggaattagtagagttttgttacaagaaggcccagggggtttggaaactttgtttctccaggctgttctgtgtgtactgatagtagccatcaattctccggtttatgaggcgctcttcctccgcagggacaagggcagcttgccagcttctgtcgctcgagtttccatttgctttgtgttgccactctgtatactctcaatatgtaaatgatattacgtacagtatgtacaatgctatatatcaggaagaaattaaacttaaaagagcttcaatactgtggaggggtggcacatagatgttctcttctgaggttacattctgaaaactgtgcagaccgggaaaatatgtatccatgtgtaatgaaaacctgaaaattacctaggatacacaaatagaaatctaagatttattcacatcacccgagtaattcaccacgagtaaattttttattgccgggatgacatggataaatcttagacgtgtatttgtgtattttaggtaggagtaaaatgcaccgctagtacctcaacttgtgaaatgggtgcaatttagtcacccatcttgtaaaatactcaaacaagttactcatcttgttttaggatgcaaatcatacaaaacatgtgttgtgtgggatgttcgcaatgaagttatgtgctatgttaatttgttttgtaaacatggtcacacgatccataaataagccaacgtacaatactaccagtattaaaatccaattaaagatgaattttttattgattgtcaagcataatatggccatgttcattgaaagcgggagtattagtatatacatgaaaaatatgagtgctaatttgtaattgtaatgcttgccctacccacatggcttaaaaaaaagaatgacacgtgggtcaggatggcatatctcaaattttgcgaaattataatggcatggttccaatttttcctaaaaaaaatgtaagatgtgaggtcaatacaacctccaattgtttttttaaaactaatacgacctccaatctaaaaacaaataatccatgtgacaatatattcggtaaaatttgcaccatcgaagtaagatgagtgacttatttgagcaatttgtaagattgagtgactaaactgcacccacctcacaagttgtgataccacctatacattttactctttaggtagtttctaggttctccctacatttttttcccatgcaggttccaacaaaagtgggtaccaatgtataaccttactgaagttacagcaggatcagaagtctgaattgggcactgggcagtacagtttcagaattactagttgacagttgatgaagttgaggaaggatcacactgcagaaccataagaaaaaggacaagagcgaatggataattacaatcaaacgtcaacgagtacacacaaaatcatgacgtttttaatcatcatatacccataaatttctcatgtaacagtcatacactcgtacatggttggcccggcggaaaacaaatcatacatggcgctgttgtcactgacagacaggcttgaggagctcaagaccagcctcctcacaacaacagagcaaccatcacagaataacaccgggccattttcaactgggtgtgtataatcattactatatgcattaacaaggcggcagtagcagcatcatgttatatttggtattcctttgcttcctcaaggttgggtggggctgggcgacacacagcaaaaccacttcttctgcaaaaacagatcaataaacaatagtaacttacatgtaacaagccaaagatctgatgatgatctcttttttttttcattttcattgagatcaataatgtgatgctaaggaaggaaatggaagaaaggaagtatatatatactgatgcggagtttgtcctgcggtggtaggggttgatcttctctgttgccttattgttattggagtctttcatgtcagagtttgacctggtgctggcgtccacgttgacggggcccttcttctcatccctggctttgctgaagatcaccgtgaaaccgtcggcagaggccgggttgttgacgtcccatgcgccgaactttggaatggtgcggccagtctcgtccttgatgagaaaaaaaaaaaccaacccatgtatatgacaagatcagtgtgattatgcatgatacgagtaagctagcgtgctattgcagattgcttctgtatcacgcatatcaattgggctatttagaagacaaatcggaatggtcaagtttgaaaaatgaagagttgaagacaatacaaattaagggtcacaatagcgtgagggcatattgtaccgtttgccctgtttcgtcccgattagagaacagagggaaaaagtcccaatctacgtttctatagatttagtttcattcttgtaatcaatctctctaggttgctcctgtcgatccaatttgcgagaagttcctcgtcacacatccaataaaaagacatggatattaggagaggacttaatatcaaataattaggagggctgaggcttcgaacccagatcgtctatcaccaccttgtatagctaatcggaaaacccctgaacgtttctccacacatccaattgccatcaggtactcaattgattcaaaggaataaacggtataatgcaaagatataccaaatggcagcatcgatcgatcaatcaatgcatatggtcaagaaagaaagaaccgagaatccaaatcaaattgcacgtacgtagatgcaacgcctctaacaaaccctgcagaggacgagcactcaccgacatggatcacggcttccttcaaccggaggcgcagaaaaattttgccctttctttgatcgtccgtgcagaaaattattttgggggcaaaatttcttccccggccggggggagagaagagagggggggggggggaacaggaagaggagcagaggaatcggaatgcttttcatggggcgctgcatggaggcgcctacttatgccctgtttcttgtggcatgctttgcatgcgacgctgcctaaaatcgtttcgttttcaaacgattacttcgcctgttttgagtttttttcggttgattttcccaggttctggacgacctggaaactagaggcggacaaccaaccggtggcccggcggccgcaggcgtgggcgtgggcatgggcgcgggcgtggcagcgtacgtggtcgcgggggatgtggacgagacgggagccgagcgcgcggcgcgagcggtggaaccgggcgtgcgaggcgcaacagaacgcggacgtggagctcccgtttcgccggtggaatcgcgcgcgcggaactgaactgttccggacttttctttcgcctgttcaaagtgagatcgactgggccgtttaacatgaatgtattttctacacatgtacatgtaatttaagtagttatataaaaattttataaaatttgataagataaactatgataatataagacactattacaaacatgcaaatctaaaattaatctacatgtgaagaaacaataaataacaatttttatctgcgtcatacatataagatttattatttttgtttctctacattgaatctttggacacatgcatgaagcgttaaatatagattaaaagaaaaactaattgcacggttaggaaggaaatcacgaatcttttgagcctaataagtgctacagtaacccacatatgctaatgccggattaattagacttaaaaattcgtctcacggtttccaagcgagttatgaaattagttttttcatttgtgttcgaaaaccccttccgacatccggtcaaacatctgatttgatacccaaaatttttttatttcgcgaactaaataggcccatagtcatatatgtttgtgtataaatttgtatcatcaattgtactgaattttttttaaaatttttttgttgtatgtaaatgataggtgccatgacacttaagtagaaaattattatccgccgttaaacatagggagctgcacagttcaacttccatggcaaatcaaacaatcactccagtggatctgagggcattgccaagtcgatcttcacaataaaactggtgggattttattgagggaatgggtttacgtacataaggccataagggtttaattaagtaccctagacaaaacattggaacaccctaattaacaaaaatggactcgatcctgtcatctaccgcgagatgacatgacacgttcttcttcttcttcttcttggatctcagaattatagcattaattcctatcaaaaccgacgatactaccgaccgacagagagctaattaaacctctccaaataacctcaaaccaagatgaacacggagacgacacacacgacgagaagcgctgctgccatggagaagcccgtgagcgcgcggccagatgcaccgctcggcgcctgtgccggcccagggctgggactcgggctggttctggcgctcgggcgcgaagcggacggcgatgtcggggtgaacgcggcggtgacggcggccggcctgggagcgccgatgggtggacgacgcagcgtcagcgccgccctcgttggccccggcgccggcgcctgcgccggccccggagcggcgggcctgacgcgcagcctcatccgcaggccgcgctcgcagcgctcctgcacgccgctgatgaagaagacgagccccgggcggtcgagcaggtacttggtgtcgccgtccgtgaaccggatcaccgggctcagcgagctgcagttcctgtagccctcgtggttcaccaccaccaccgattcgttcacgtacttgaactctgcaaaatgatgcgaactgtgataatgatcgccgttcgcagatcggcgatgatcttgtacttacccacgacgtcgcctacgcggaagcgattctttagaccccaatggttgtacgactctgagcctgtgggcggcactgcccaccccctcgcatcgccgacggtgtacaaagccgccgacgacgacgacaccgaggcggcgaggagaacgaaggctacagcggcgaagattgcaaggctagccattgtcgaagaatgttgctgctagcctctctcgtctcgatctgtgcaagtctagggttttgtgttgttgcgagcgtgagccgtggcggtgtctctggccgggggagtttatatagaggttttcttcacgaaagcgagtggcgccggcggaagtggtggtagtggactgcgtacgcgccgggcggttgggtttggagaagagacgttgcttcactgagagccgttgatctcttactggcttccgtatggacagccgtgattggcgattgacttggtaagagatgccacaccatgcagatcgttggggggagtctaaccgctctgaagctaccgaacggatcaaccggtcaatggctcgaaggaacagcagtacagcacacacatttcgcttatgggctccaagatgggcttcatctacatggctatttgggccgtggcaaataagattcgcgtagcccataggtttgcatcctggattgaggcggaattttgatgtacgctaacttcactaggaggcgtacttttgtaatacgtttgaggttatttcggtaattcggtcacgtggtgccgagaaaccaaaaacccctctccaaaccgagccactgctccggcggcggcggcggcggcggcgagttgagatggctgacgacgcggcgagtgagcaagccacggacgtggccgcggccggggccgcggatgaagggcagcctccggcgatgtcgaaaagcgcgaggaagaagctgctgaagcaggagaggcaggcggcgcagaaggcggcacggaaggcggcggagaaggagcgccggcgcgccgacatagagaggcgaaggcgcgagtgggaggaggcgctggccgcggcgccctcggaggaggcccgcgccgagatggtggaggcgcggcggcagacgcggcgcgagcgggtggggcggcgcgcggaggagcgcggcgcacgcgccgagcggctccgccgcgcggccgagggcgccgggcagaaggtggtgctggacctcgagttcggagatctcatgcggcccaacgagattcacagcctcacgcagcaggtggatttgctttgcccttctcgcttttgtacattttgggctgaaactaaacttcatgcttgaaataatgctaatatgcgaatcatgtgtgtattgatatatatgatatccgaaggacattccagtaacttgattacttgtgaaatgtatatggcagatcacatatttgtattggcatggcttgttaaaggtgccaaaaaaatatcctgattctttttttccaaaaaaataaataaatctttatacttttattacttgtccataatttctactggatgttagcagtttcacgtatgaatcttttattcatgtgtcaactggatgttaagtgtagacctgtaagagaaaccagttatatgaatcttgcatatatgatttttctatttcgacaacctggtggcttgtgctatctggttttaatcatatatatcaatatgtgctaatgctatagcattgatctcttattctatctgaagtatgttctgatattgacaaaagttaatatcaaaatgtctttatgtaccaaaatgccttctacctagaaatttctaaaaaaaaaaagcattctaccttcattaatgtctagttcgagcaaaattgttacccttgtactaatgcaagttacagatcatgtactgttatgcagttaatgggaggtctacgaaccctgctcatctatggttgacaggttgcaatggagaaatggcaacccatcttcaaaggattcctgggtatgataagtggatgattgaaaaggaggccaagtcttatcttgaagcatttgaagatcgtaaagaaaaccttgtgtaccttacagccgatgctgaaactgtgcttgatgatctagacatgtcaaaaatatacatcatcggtggcctagtggaccggaacagatggaaaggtattacactgaaaaaggcggttgatcaggggattcaatgtgccaagctccctattggaaattatttaaagatgtcaagttctcaggtgatcatatggatatgtttttcccagtacagaatgttggcttgcctgatttctttcaatcaaatggtgttttgtgtttcatccatacttccaataagggttcaaaataatccagtatgcctacatgttgtgacatcttctatcagataatacagtgatatgttatattatctctccgcatgttaaatgatcctgaaaattcttttagaaaaagaaacgttttttttaagatcttctccaaaggcttcaaacgtgttagtgcagtagtaagagttttatgtgttttgattggctcttattattaatattatggcaatcatttatcatggatcagtctaaatagagggttatttagaacaaccctagtttataaaaatggcccggaatttggatgttggagaatttgtgctaaagacttgaagattgctgactctccttttatgtaatttatgcaggttctgacagttaaccaagtgttcgagataatgctaaagtttgtggaaacaagggactggaagacttcgttctttcatgtgatcccacagaggaaaagaggagaagctgaagctggaaatgatggggtcgatataagcatgaacaatgttgatgccgccgaaggggctgagaatcaaggtgaccttaccaaggtttttgatgaggatgtagatgatgacgatgttgttgatgaagaactacaagaggaagacaccgatatggctaagaaaaagcagtgtattagacatgaaaatggtgaggcagaggatgcctccaccaggccagctgaggatcactctcccggtgcagcagcagagacgacgacacccaccggaggcgctctcccccaggctgagcagagtaaagaaagcaatggtgccgatgactgaagaagactggactgcaggtgtatgatcactgttctgtagaactgcttttctttaacccggggttttaactcgggcgtacattgtttggagcgctctcttttcgtgtatctcagtcgtgtttgacagcctactcttgtcattgatgactataacaaggtagccctgaacccgttgcaatgcctgcaagcgtttggccagtgatgtttaccaatattttaaatagcgggctaagacatttagcggttagcttctcaaacagttatagtaggctaaatagagctatagcggctaaattgtacatgagatcaaatagctagaatctttttcaaacaactatagcgggagatagcgccagctatagcgagagatttaaaactatgtttacccaagggaatccaaaacatcaaatgtgaacagagtgctttcttctcatccgtaaattcagaaacacacatcacatccctcgagtagtttttgagtttaggaacctgtatgatagctgcaattcagtgttcactgggaaagttgtcatgcatgtcatcactagaacctagaagagggtacagccacaaggatactacggttggtacaaattgttgacgggcccgaaagcggcagcgcacagctaaattcgttctaaagcatgcgtgcgcacgttggagccaggaatcgtggtacgtaccactagcagcgcgcgcgtgcccctggaagcagctagtaaacagtcggtggtaaaatggggaggagtacactgctctcccgcatggcgaatgcagggcgctgcacacctgcatgcatggctacagcgccgcacaggggggggacgcagatgtttcgtcacgcacgcatggcatcattcagcgccgttgcgggtgcagtgcaggtgcagcagccacaagaaagaaagagaataataagagcaagtttaatattatagtccactgctctacaatgtaaggtcattctcaacccaatgactaatatggtgtctatagaattaaataagctgtcacttagaataaaaaataatatgacaagtgaataaatgaggaaagagaaggaaaccatgtcttgcatgagacatggtttctacacatcatccaagatatcatgtgagataagtagcattaaagtcaagtatggaatagtggtgtttgcattgaaatagtagtgtataatactagtttcttgatgatgtggagtttatgaaaactatgtctagtgttttgagttgggaatagcccattcatgcaataattgtttattatactattaataactcatctgtcatacacatattatgtattggagtccatactacagctagctacatatatgtagctcgctgctattctctctctttttttatctctttaaaatatattatattacagttggcttatagcatactattgtacctgctctaataaaaaaaaatctgacctgacctcacccggtcgtgcgtacagtaggggagagagacatacagaggaggatgcatcgatggatcgatcgatcgatcgacagggcccccgtaggcaatgcatgcatacatggggaaggagctactagctgcgatcgatgctggagagagctcacaaaactaggcgatgctgcggcctgcggttcccaaagcgggcagccgagacgggcatgcactggccaccgatgcagggggtaaacgaaacgaagcccctgatactgatccacgcggctgaaagcagcatatattaacgtacgcccgcgggccgcggcggaagaaccgggcaaccctccgcgacgcgtatacgtccgtgtgccggcagcgagacgacgtaccctccgcaagcaagctagttcgtgtgacgcgccatccaaattaacatccgctggtgtggcagcgcgcgcgcgtgcccaattatacgatctgagaatcctgctatacatatgactagataatatgattcgcatatgactctatcgcgtcctccaattactgtgcttaagtttcttagagtatcataatacggacccgacgagcaacagctgtgtctgtacatgcccgtatcgtatgtatgcagactgaacactcgggttggatacgtagcaatctattcgggttgggtagatatgttagtattcacgatccgtatgtacgtacgcgccgtgcgtgcgtgtcgccggtgcccggtgatgggctcggaacgtagtacgtacgacgagggcgcgacgcaacgtcgatcaggcgagcgaccgtgagtccttgaccggacacgcgtgcgtccgtccggccggggaaggcaaatcacgcgacactccagtagtactccacccgtatatggcgccgtatctctctccctctctctctagatctctctccctctctctccgttgggttggtatgcagtgcgagtgcgcaagtgtaactttgttttggtaactttattttgagcagtcaaaatcttatttgtaggttctttttagagacatactgacttcagaaataggctcaactataaaggtacggtgatcatatcaagctaataaaagatatgtgtcgtaaacttgagtcaacgattatgcagcattctaccaacttttggtggagattcaccaatagaattcagtaatggttagtctttatattgtttggtttttattagtttgcttttacttttagttttgttactttggctacttactcactgtatgagtttgcttttatatgaaccttgtaatagtaattgacaactcttgagggatcaatacacaattgagtaagtgtacataagcttccaggcgcttaattagtgttataagacaaattccacttgaagataaacgtgcgatcgtccgatcgacacaattgcgttaagattagaacaagggtaactaggagtagtactagctggatcgagtacatgaacggtgaattaaactgacagtaggaaattaaaatctcatcgatcactacctgaacgtagcaaattaattaaaccacacacgatcactaagtcttaagtttttaactggttcaagttagccagttgcactactagctcgatctgcatgcgatacgtgtgcatgcaggtgcagaccgatcgccattctgctgctgttactacttgtatccgaacggatgctggtgctcgaagttgacggtctgcggcgtgccggcgccaccgctgccgctgctgccgctcccgtcgccgccgctgccgggcgcgtacatcccgccgtagtacgccgccatcccgtgctcgccgccgtacatgtcgtacggcggcgcgtactggccgtggtgcggcggcatgagctggtggaacgcgtggtggtgcggaggaggatgcggcggcggcggcaccgcgccgccaccgtacatggcggcgtgcatctgcatgtcgtggtgcgtcaccatggagccctgcgcgcgggacttgagcatcccaccgacgtgaccatggtggtggtcgccgcgcgcggcgccgacgccgacgccgacgccgcgggactccccctcgaactcgcggtagcggtggaggtagacgccgaggggctcgacgtagtcgtcgaagccgaggcggctcatggcccagagcacgtcctcggcggtgatggtcttgcgctgctcgcgctggcaccgctcgttggcctccccggtgatgaagctgatgtactccgacacgcactcctggatcgtctccttggcgtcgtccgagatcttggcgtgcgccgggagcacgcggcgcatgatgcggatcacgttcgcgatcggcatcagccggtcctgctcacgtatagccggcgcggccgccgcctgctgcgcgccaccgttcccgtcggcggcagcgccgttcgccgccgtgcccgggtagccggcctccattggctgcgtgggaaagctagggttgcctcctgtgggtggtagcactagctagcagctaaagtgtgaaactgttgctgggctcgcttggtggtggtcgatcttgtgatgcgtgtggatacgttaaatagggacgctacgaggtgttgaccacaaatgggagtagctagccgtagagaggcatgcgccgaggtggcacggcgcctgttcgtgacaagtggcgccggcttcgctgtggtcactgctcgaattttttaattttatttattaaaatatttaaaaataattttctatttaaaaaaattacaaaactattagtcgtccatcgtcctctaggagggcgattttgctaatgtggcagacagccgttggccctcccataataatcggcatcgagggaggagaaatttacagacggccccctcgtagccttttgggagggcgattttttactttacagggggccgcctacgaaaggcccccctgcactgtagaaaatcgtcctcccagagggctaaagggggccgcctgcaaaaataccaccctctcccctatagtagaaaatagccctcttaggcggcggcaagggagatgcctgcaaaaattctaggtagccctcccaacccttttgtaggtggccccctagagccaaaaatcgccctctgggagggtggcaagggggccgcctgtaaaatttgagcgtcctcgatggcccgccgttatggtagagccaacggccatctactacttcggaaaaaacgtcttctggaagggcaagggcgatgggcgactagttttgtaaaattttcaaattaaaaattatttctgtaaatattttaataaataaaattaaaaataaaaaaattcgtcactgctccatcggtgtggatgagctgtcacatgcgaagaaacggatggaacgaaagattgggtgatttggtttagagcaagtttaatccaaatccctccataaaaaaaactaaaacgtgtttattttgttaacaaaatcaagaaaaaaaaactaactcatctataacagagacaaaaaaaaattatacgtgtgcttgtaactaacgaatattaagatggttgctcgggttccggttaatgatttattctaatatggcaaaacgagaaatacaatctctttatttaagtcttacatatatggaggtacaaatatgatcatctcatttgaaaaccccgaaaataaaatatgcttaagacttttcgataaatggagtataattattgtgtaattactctaacttatatacaagagcctctttggtgcggtagcaatgcgttggtagccatgcgtgcgtgttagtatttttttttcgttgtgcctgcatgaatggagcacgtctacgatccaaaactcaaacatacttgttccataatttctgatgacaaaaaccaaaaaatttctttgattttggtcaaagtcaaactactttaagtttgatcaagtttatagaaaaaaatagtaatatttttaaaccaaaataaatttattatgaaaatatatttaattattaatttaataaaactaatttgatagtgtaaacattactatatttttctataaactttattaaacttgagcagtttaactttaataaaagttaaaacatcttataacctgaaacggatggagtactatcatttgtaaattaatgtactcttgtacaatactttaacagggcggatccataattcagagtcaccgaggtcaagacttacttggattaatatcgtgtttgggagggaatcaacgcacgcagcgaaaatgaatagacgtgctgcgttcggcctatgcgacttcaacaaattccttctaccccggagaatgggggcccagtcgcacttgtggcactcccttcgggacgaccctgtctaatcccctactcctagtacactttctagttcaaatttgaattacaagagtacacttattttagaacggatttagtagataattttaacatggtcacatgggctaacttatatggttaaatcaatttatgggctaagcaaatggatgggctaactctgccggaacatggtggcgtcaaaaggcaaatcatatactaatgtaattcattgaagaacataatgtctacgtaggttaaatcaagattcattgatgccatgtgacaatagcctaacatgttggctccacgcctccactgatgtttgtatgtatttatgtcctccgcatatctagaaaaataaagagtgaattatataggcggtcgctaaacttgtgcatttgtgtcatctaaacttccaaaatacatttttaagtccttgaacttgtcttgggtagcatataggtctaaaccggttctaaattgtcccatatgctgacgtggcatgacacggtgacaactacatgttagtgggatccacatgtcagttatgtataacaaataaaatttaaaaccatattttctcctcttaggtagagagaaaaaaaaggtaaacttaaatttatatatatatatatttaattttattttttctatgtaactaacatgtgggtctgactaacacataggcaccatcgtggcatgccattttagcgtatggagcgggttgagagcccgtttgaacctatatatataacatctaagacaagtttggagattcaaaaatacaacattttgatagttcaaggatctagataacacacacatacaagtttagaaaccgctcatgcacttcactaaaaaaataaatgcattcattgttggaacaattgtttttattcttcacgtatatatatggacatgtcattattgctagtttggggtgtaacacaccttttgccaacactggatattactccagtgagatattacacacacacggagagagagagatcctaggcagtaaactaaatcaaataacatcttggatctacatgtgtaaatttctcttttgggatttgttcatcagtgtaaaacatatatgtataagatcgaattgtatatcgacaggatatttcatttgattttcaatacaaaatatttttcatagtatatttttttgttgctgttgctacagtaacattgctaaaacaactatctcatgtggaaatagttgaaagcctagaaaattccaatatatatattgtcgacgggtgatacccgtagaccggatatagagggtattggggtacgttggtacaaggatctacgtagtacgacattgaacaatcaaaagacaagaattatactggttcaggccccttggtaggtaatagacctaatccagttgatatgggattatatggtggaaaacacagattataaagggaaagatggaacttgtcggatccggcgagatcgtagtcgagtggattcgactagctctcgatgacttggctcctcgcagacttcgacttcgtaggctgtgtgggttgtgttggctctgagattcgatcccctatgccctccccgtggggtcccttttatatcacagatctggaggtctccaagtaggactcggagatatcggacccaatacgatacgtcgacgacccagttctgtccgagaaggactcttcccatctgtagatttcgtgaaagttttccttaggatacgtaggaaatatccgcgtgcgcgtgggtatgccatgtcgatatgtaacgtatatcgaagggtagagggtatgcctgacctgtaaccctgacagtagcccccgacttctgcttaaatgaactcgtgcaaccatttacgacttcgggtgtcgagaacgttgtcattcctggtgcgaggaccgcggagatagaacgtagtcgagcatgccgtttgaagcccaacggtcacgagtgaattttgaactgaagtccagaaaattgccgcgtgtaacgggcccagagatttccggcggggatctctctccgttccttggaattcgcaccgtcggtagtgcgcttatttaaaggaattttgggagcccattttgaagtctgccaatcttgttgaaacataccgcctgccagcgctccttgccttctccgccgccgcaagaaaacctagtttgccaactcaggctcgttttccggcgatcttggaacagcaatggatctcggcaagtcgtcttccaccggcgcgacgttgaagaaccttcaggaggacggcgcccttcccggccgtgaagacatggagagagaagtaggaggtactgatcctcagcccctcttgggtcgcatggttgcgatcgaagattacgttgtctacggttttcttcctccaccttcggagtttcttctcctggtgttgaaaatttctatggtctttctcttctccatttgaatcctaattccatcgcctttcttagtatctttgttcatctctgtgaggcctacattggggtagagccttttctcgatctcttccgtttctactatgaactgcgttggatggaatccaatagggtgtctggttgcgtcgggttctgacttagtgatggcatgaagtcacgttatatccccttccagtgtccttcttcccgcagtaagtggcagaataggtggttctattttgagatcaaggactcgaaccctgtcttcgttgttcccgaggatcaaccggacaagattccggcctggaccgccaagccccctttgaccccctctcttcagtcgtttatcgacatcatcgatgatctccgagaacggggcttgtcgggatatgaagtcgctgcagacttcgttggtaggcggatccagccgctccaggctcgggcccatccagcctataactatttcgggccgaatgacgcgacccgggtttctcctcggggtatctttctcgtattcatcttggcgtgcttgtactcgcgttcctcttgacttatcaaaagttggttcccgtttaacaggtctgagcagcgaagctgtagagcggcgcgtcggtcaaatgatgatcagcggtccgactacggctagcgacatcctcgtgcccctttgtgaaaagggggcggcggaacgtgatgaagccatcaacgtaagtgtatttgataagcatcccgtattctcctttcgaaatcaccttatgacctgattaagcgtaggcccttcctttgactgacatcatcgggccgctcgcggaccatcaggtggcgacatctctaaaggagaaggttgtcaaggagacatctgatgcggccaccactagcgaagtcccgaccaaggcgaggaaattctcgtctgtactcggacatcgccgcaaggcagcgaccccctcggtaatttcatcttgtcgtcagatcgtgcagcaaggagggtttcttcttactctgtattgattgtatttcaggcttcagacgcgtcccctccacctccacgacgacagcgcattgtggcgatcggcgagaagtaagtaaacagattcgtggattctcgtgcttctcgttcaaatggtgtttgattcgtggttgtccgtagggaggcgcgggcgaaggctgcacgggccaagtccgggggagcttccagcgcgtcacctgccacggcctcgacagatgtcgtgctcgtgaccgggagccgggaggcgacgcctagcggccccgtcagcgatcccgctgcaggtcgtggtctgccagcggccgttctcacctgggaagagctccaagtcgagatggggcaccttctcgaagctggtgctcgcggcatcggccgcgagatctcggaggcgaggtcggaagcggcgacggcgaacacgcgtgctgagagattggtgcgcgagctagctgaagcccgtgaggacctcacgaagatgagggagttggtggccggcaacgagcgtcaacgaaaggggctcgaggaccgaatgtcgaaactcgggaacaatctctccgagatccgtcactcgttgcgggtcacctacactggcttccatcagctcgccgaggagtgcggcgtcaagtccacgatcccggtgaatcccgacgagtttttgctgacttcctctcttgcggaactagcgacggcgatgggggaaatcccctccaagcatgcggccaggatcgcggaggagacgtcgaacgacatctacaccgaggcgtgtcacgtcctcgcgtgtgtaagattgtcgcgtcctgaactcgatctgcgcgagatcttggatcagggggcggcaagcgacacgcgtaaagaggtgatggaagaagtcggtgatatgggggagtttgttctccccctttttgaagagtaggacttcttgtatttgttacatattgtgtaaatcttgaactctggccgccttcgtgcgtgcgattaccacccttgtccaattttgtatgttgatctcgggagttttatccattgtagagatgttgatgacgaggatgtccagcagcgcgggcagcctgagtcactggcgatgattctggcactcgattttgaaccacatgtttcgtctgacaatgtggatcaaactcttgatgcggaggccgggatggcaacggccacctaaagtgagtagccttttcacctcttagtgacctcctgattaggttatttatgttgtaaaggaggtatccagcttgtcttagtggtcgtcacgtttagcagatctcgagggtgcccttgcaaatcaagatcgtcgtatccaatactggaagacgaaatttgaagtggcggaacatgagagaaccatgctggccatgaagaaagagcaggctgtggagacgctccgaggtcgcgaggtgtggtttaattcttacttgaagagttgctgtgcctccatggccagagtatgcagggaacttcgagtagtccgcagtgatcccgaggagtcgacggccgggtacatctcttggctaaacggggcctatgcccaactcgatggcatcggcaagcatatcgacgaggccttgaagtaagagtgtcgtcgagtgagtcaatacgccggagggcacgtgctggcttgcctacgagatcaccgcccgcgcctggacctcgagtttctccgcgaaggttttgctcgttctcggagaactccggcggagatagaccatctggcaaggtcaatgtcgccgctggccgagaaaatcttccagtctatggactggcattggccttcttgatagtactcgtgccctgtcacagatatcttagtgaatgtcacgaccggaaataacccaacgggcgttccttacgtgcgtgcattattccttgtcccaggaggcaaggtacaccaaaagttgatacaattcagagtttaacaagcggaagcgtaattaattaatttattacatgggtggcgaaggcccagcacacaagaagacaaacgaaaaacagcggaagactagggcgacgaccacaggtgcttgacggcaggcacgagctagacaccaaagccttcatcttccaggaactcctcttctaggtttgggaaaaaattgagcaagactgagtacaaccaccgtactcaacaagacacacccacaagtgcagaataaatgcaagggagtacaagggagccataatatagggagttagggtttgcagtaaacatcattaaaagacacttagttgctcaaagctattttgtaaacatggtcctagagctatacaatattattaatcaaggtcgtgaacccacacgaacctgccttaacccaaggcctacgatgattcagaccgaactggcaacccgaccctgggtcccagctcgtcccaagctaacccaggccaaccattccacattttagttgttgagcaggttttaagaattaaaacactaacttgggtacattgctcggcttgcccataaccgagggcgcggctattcgaataggttatactctgattagaggtgtacatctttacccacaagacacatcttcctcacgtgtaatcacgtgccacatacccccacggtatacggacggaagacgtgacatagtttccaacccatcctagccatagacaagagtaccgatccaaccccacctacggccggaacccccgggacaggttggcaggactgagctcctagcagcaggacaccggccctgtgccatgacatctcgactaccgggccgcagctcgtgtagccttcatttgtcctagagatgtccatcaacccccgacttcgtccatctccatccgtgtacttttgtttataaccagactgagccacaaactaagccttacccactagacatgtggaagtacggtagtgctttgcaacagaggcccgaagaccggtccttatatggccgaggtgctactatcaaaaccatgcaccccgagcccagcctaaaaccattttgaggattttgaatagagggggaggtgtgaatccaattccacaataatccaaccattccatagtgtccaggtgatataaatatcccaaagtctagagttgtaaaaccacctaatgttgcctaattaaccagcgaagcatctacctaaaatcatactagtggtaccatgagtagagtgtccactagttggggttttgtttaacctagggtgaacaaggtaataataacaataacaataataaggtcataacaaagttaaataggcatggctagataaaatagtgataacgcgggaatttaagtaaagcgataatgcaataatttaaatcaaaataattttataaactgggattcaatatgctcaaggatgatgtgtcttgccttgctcgctttcccaaacgtcggcttcaacctccatgaagagcggatcttccgaagctgcagcgtctacacgaccaacggaaaagaaaaggcttttactctaataaactccatataacaagcaggaacaaagcacaaaaatgggttcttgacttcttaaggaaaaattagagacttgaacggtccaattccgagttcaaatggccaagttatgtccatttgaagttcatatgctctttaaatgaatatttgtgaatttcttcatttaaattttaatttaaaaatgggtttattgcgtcagccgagaggggggagggggcgcgcggaccgggtccacgggagtggggcccacgcggcagcctcacggtccacggtggaccggttgcacccgggctcacaccggccgacgccgtgggccccacacgtcagccgcacttgagggcgcgggcggctgacggccgggccccacgcggcagccactcggcgcgcccgagggcggtcatgccggcgcggtcggcgggaggcggcgcgcccgcgccccgatggtcgccgccggcgaccaccggcgcggcggagctgcggccgagagaggggagggaagggggaaaggaggcgatggtccacggctcaccccggggcgacggcggcgacggaggaggcggccggagcggagggaggcggtggcgcggctcgggtcgacggggactgcggcgctccggcggtcggcgaccgaaacggagaggtggacgaggtcggcgaggatgcggcgaagccgaaggaggcggcgccgaggtgggaggcggtccggggcgacgacggcggtggaccggagctcaacggtgatggcggagagagagagcgacgtcgcgagctcaaatccggcgaggaggaagggcggcgagaggcggaaacggacggaggaggtgcggggagggtttaaatagggttggaagggggagagagcggccggaggggaaggaaaccggcgcggcgctctcgggctccatcaatggcgccggcgggattaggggagggtttccaaacgaatccaagggagagagggagggaaaattggggggaaagggagaggggatcacggggagtgatttccccaactttattgcacgcggggacggcgggaggcagcaggattcgcggcggcggcagcgctagggcgcgggggaggcggcgggagcggcgggaggaaggggatgacgggtgggccccacccgtcagcgagggtggcgggcgggccagcccgtcagcagcgcgcgcgcggggagggaggccgaataggccgcgggggagaggagagagagagagagggggagggagatgggccgaattcggcccattagagaggaggaattttagggtttttctttttataaaatcattttaactttgtttatttcttaataattattatttgtgctctgagaattccactaaaatttatttacgtattttaggcttttaggaaatatagaaaaatcctctaagccttatttgacttttaactttgcacattttaattgttggaggctttcacacggattttaattattctaggcataatttagaggatatattttagggtcgttttgggacgtgacagggaaagatgtaatgtagtggaaaatttatgtaaaaactgtaagaatcattttgtgaataaagaaatattccttaaacaaatgtatcttactctagatgtcgtgtgtaagagtgtgttctcagttaacgactttggtcagccgtttgagtcgtacactctccctagcccccagccttgtcgtcggaggaattttctcggaggataaggctcttggacccttgacctgccttggttgaataagctctgatcctagcccccagccatgaggttggaaagttgatttccgatttcacagtttggttaatacgcacggcgagaactcttacacgaccagatcttacatggtcttttttctctacaggatctgacaaggctttatcggctctgggcgtccccagccgaagatcccttaggttcctcggaggccttgtcgagacggcgtaaagggacataaggacaggtttcaacgctaggtgtcatcagagtaagggatcatcgggtgaaaacactttgattgtgatatgggacctagaaataggctttattgatactgtaagggtacttacaggtacagtggtattgactaatacatagaatttacgtagttggtcaatgttctaagaatttgctaattcgcgaccgtcgccgtctgcgattttgaatgcccctgaccgcaagacttgtgtgatcgtgtaaggtccttcccattttggtgagagtttgtttcgccctgcttgggtttgaactcgtcggaggacatagtcgccgatcgaaagtatgcgtgctcggatgcgcttctcatgataacggcggagggactgttgataactggctgctcggacgacaactcgctcacgatgcttctcgagaagatttacatcgttgtctcggtgttcctcctggttctcgtcggaatacttctgtactcgtgtactctgatgtcgtagctcgccggggagcatggcctcggagccgtacacgaggaagaagggtgtttccttattggacgttgtcggtgtggtgcgtacggcccatagtactgatgggagttcttcaacccactttttgtcttgtgacatgagcctgtcgtagacgctggttttcatcccttgtagtactatgtcgtttgctctttcgacttgtccattgctttgagggtgagagaccgaggcgaaacatattttgactcccaacccgatgcagtaatcttggaagtcagcgctgatgaattgggagccgttgtcggttatgatgcggtgcggtagtccgtatctgcagaatatccctgtgatgaatttgatggcgttgtcggccttgatttcccccatgggcactgcttctatccatttggtgaatttgtcgatcgccacaaataggaatctgtagccaccctgtcctcgtgggaatggcccaagtatatctagcccccagcacgagaacggccaagtcagagggatagtctggagcgcttgcgcgggtagctttgtgtgtttactctggaattgacaggcttcacatcgctggaccatatcgcatgcatctttaagggcggttggccagaaaaagccttgtcgaaaagatttgccgaccaatgtccgactggcggcgtgtgacccatatatgccttcatgtatgtcgaggaggaggtgtctgccgtcgtcggtagagacgcatttgagaagtaccccgtttagagcttttttgtataaatcgttaccgaccatacagtagatctttgctttacgggttattttctcggcctctgtatcgtcctctggcaactcctcactgctgatgaatttgattaatgggatgtgccagtcgtctgtggtttcgatatcagcaacggcgcgttctgcctcggtgacctccgagctgatgtcgggggtgttcgggctaacttcgccgctaacttctttcaccgatggcttcgtcaagatatcgagaaaggtgctgggttcgagcggttctcgtctggacgggcatcgtgctaggtcgtctggctcgacgttgtccttgcgatagacgtgtcggacctcgatcccatcgaatctcttctctaacttcctgacttctgcgagatacttggataactcgggggttagagcatttatagtctttgtgcactggttcgcgactagctcggagtcccctttgacgattagtcgcttggccccaagtgcggctacagctcgtatcccggcgagtagtccttcgtattctgcagtgttattggtcgccctgaagttgaggtggattgcgtgcttgaattgatctccggagggagacgtcaagataaatcctgcccctgctccttggctgttgagtgcgccatcgaacgccattgtccatgtttcgttgtcaccttggttgtctgatttgttgtctggcatagtccaatcggcaacgaagtcggcgagtacctgggatttgatggctgtccgcggcacaaagtggacatcaaattggcttagctcactacccatttcgcaatgcggccgacaacgtctttgtttctcacaacttctccaagggggaaggaggatacaactgtgactctgtgagcttgaaagtagtggcgcagcttccttgatgttatgatgactgtgtaaagcagtttttggatctgtgggtatcttgtctttgcgtcatggagagcttcgctgacgtaataaactggtcgctgtactttctctctctcgacaacaatgacagtgctaacggaatatggcgtggcggcaatatagaggaataattcttcattaagttggggagcagcaagtacaggggggtttgataggtagcgcttgagtgcaataaatgcctcttcggcttccagtgtccatataaatttgtcttgtttcttcaatagagcgaagaaaggttgtcctcgttctcccatcctagcgacgaatctgcttagtgctgccatgcatccggttagcttttgtacctccttgagtctcgtgggcgacttcatgttctcgattgctttggtcttctcaggatttgcctctattcttctgccagagacaaggaatccgagtagcttgcccgacggtactccgaacgtgcacttctcaggattgagcatgaggcgatatcgtcggaggttgttgaacgtttcccgcagatcgttaatcaatgagtcgcttgtcttggttttgacaacgatgtcgtcaacgtaagcctcgacattgttgccaagctggttgctaagtgcgccctggaccgtgcgctggaaagtattcccggcggttattagtccgaacgacatcttaacatagcaaaataccccgaacggcgtgatgaatgctgtcttctcttcgtcctcttttgccatgctgatttggtggtagccagagtaagcgtcgaggaagctcaatagctcgcaactggctgttgaatccaccaattgatctattcgagggagaggaaagtgatccttgggacacgccttgttgaggtcggtgaagtcgacacacattctccattttccgttggccttccgcaccatgactggattggctagccactctgcataaagtacttctctgatgaagccagctttgagaagtttgtcgagctcttctcgtatggcttgtttccggtctggtgcaaatctccgcattctttgctttactggcttggcatcgggtcgcaccattagtttgtgctcaatcacctccctggggacccccggcatgtcggacggctgccaagcgaacacgtcggcattgtcgcggaggaaggtgataagcgcgagttcctatttctcgtttagtgtcaccccgatcttgacagtcttgtcgggattggcactggagagtggaacgatcttgatggcgccgtccggtttcggcgttttatttgtcttgctcactttctttggtggctcagtcgtggcgggtgggctgggcgtttgctcgactatgtcgaggctccgcttgtcgcactgcaccgccagctttgcgttccgctgaatagtgattgttcccttcggtcccggcatcttgagcacttgatatgcgtagtgagatgcagccatgaacttcgtaagtgcagttctcccgatgatggcgttgtaagttgtatcgaattcagcgacatcgaaggtgatctgctctgttcggaagttgttggcctggccgaaagtcacatgcaacgtaatcttgcccaaaggtctggatgatgattggggagtaattccatggaagggttgatcagttggtgtcaactcactttgcggaattcccattgcgtctagagtactggcgaaaagaagattgatcgagctgccaccgtcgatgagaactcgcgctaccttgatgttccgaatagtgggtttgaccacgatcggatatcgtcgtgggataacggcggtcttggggtggccttcttccgagaactctattttctactcggaccacttcatcttgggtgcagccccccgccatgtcgaacagacttcacgttccactttcttgtattctcgcttgaaggagtacgttgtggagccgccgaaaatgtgtgagacgtggaggtcggagtctgaatacgcagaatccgattcatgaggagccgtctcttcgttcttctcgacaacgcgtactcgcttgcctttttcaaatgccatgtgcttctcgagcgattttttgaaaacaaggcaatcttctagagaatgtccgtccgtcttgtgtatggggcaccaagatttctttgtgtcgctgccttgtgggtctaggcgcttgggagggttcgcgcattctgctgcgaggacttccgcttgagctttccttttcccatttttgcgatttttcttcttgcttgactcagatgcgtctgtggctgatttcttctctcccccggtctttggcttgtcgttcttgcgtcttagcgcatcgtccatatgggcgcatcgctcaacgatctcgaataacctccgagtggttgtgatgcgtcttgtcgccaattcctgggtagtataacgatctctgacaccggatttgaaggcgcggattacagaagcgtcggtgatttcagggattgtgtttctgcattcgttgaagcgtcaaacatattccctcaatgattcacctgagttctgtgtcaacgcgtgtaggtcgtcttcgatcgcgtggcgcttatacgttccttggaaattggcgacgaattgttgccacaggtctgcccacgaagagattgagtagggaggaagatgcatcagccatgaacgtgcagaacccttcaacgcagttggtaaatagtttgctagcgcgttgtcgtctgctccggcagcatagagtactgtggagtagacttgaaggaattcttctaggtcggtgctcccatcatacttttcaattgctccgggtcggaatctctcaggccatcggacatcacgtagggaacgaccgaaagccctacacccagcgttgggggcggtgggttgtcggcggtcgtgtgtccttcgtggatgtctgtctgacgatgaggaggacgcagatgatgatgatgacgatgggtcgcttggttccgacgcacgattacgaggatgacagcctggatctcgagaatcctgtcgttgtctctcgctgttgtctcggcaccgatctccattatcgtcgtcgttacggcggcggccatgaccagcattgtctggcccccgtcgttcgcgatcattgcgatcgtggtggttgtcgtgatcctggtcctcgtttgagcggtctcctcgatttccgttatcatggcgccgtgaagagacatgacgccgagagtgatttacattgtctcgtatgcgtcgtgcttctcggcggccgttgatttgatctcggagatcgccagcgccgcgaggtggaggagtggctcgttgaggtgattccctccgttccggatcttcaccattggcgtcgccagttggcggctgatcttggtgcgctgcggtagcggcttcttcaaacgcgttactgaggttggtcaccgattcccgtagtcgttctgtccaacgctcgaggtcatcgttcagaacgggatcgtaaggagtttccctcagtatagcttgaacggccctgatgtgttgggctggagtagtcgattgattcgccgcttctgcgttggcttgcattgacgtgccaacgtcatcgatagccaatacctcccgcggcacgctcgttgtcgatgacccatagtcttcgagaagatgtaagaccgatggttcgtgaggatcgatatcgattaccccaacgaatcgatctgaggctggagtcgctccttattccttgccgttatccctgacggggacgtatgacttaggagacggagctttcatggtgccgaggaagactttgcaactcgagaggtcgtgattctttgtcttgtgaataggacaatagacatcccgagttggagaagtacgttgaattccacgttctttgtaggcgcgaatttcagcacggacgttgaggaaaacccaacaatctagcagggtgtgtttcttggtgtggtggataggacaccaagaccttgtggcttcggaagtcatctttgccggctcgtggttcatgtcggaaggacaaggtttggccatatcagaatccttcccgagcttggatgtcgtcgatgatctgttttccgtttcgacgggtggatttttcgacatggagtcgccttggtttgtagccactgcgttctcgtttccggtcattggaggaccggttgagatcggcgtcgtggtgtaaaccgggaagacgatttcgccgacttgagtccataccagcattgttgaagcagggaacgcttggctgaggctggtgttgacgttgttgtcgacgaagctggatgacatagtagtagaaccttgagtaccaagtgcccctacctggcgcgccactgtcgacaggtgatacccgtagaccggatatagagggtattagggtacgttggtataaggatctacgtagtacgacatcgaacaatcaaaagacaagaattatacaaggtctccaagtaggactcggagatatcggacccaatacgatatgtcgatgacccagttctgtccgagaagaactcttcccatctgtagatttcgtgaaaggtttccttaggatacgtaggaaatatccgcgtgcgcgtgggtattccatgtcgatatgtaacgtatatcaaagggtagagggtatgcctgacccgtaaccctgacatatacatacttgtgaacaattttgttgatatctactacaattaatgttttgaccatttttgtttgttttgtccagtccgttacatgttcaaattgcctacggatagtatattcttggttagaatcaacagacactggtggagaaacaatctttcgttggtcggccgaattccacaatagtcccggttgcaataaaaatcggggctaaagatgatctttagttccggttaaaaagggtaacgggcatatttgatctttagtccggctcaaatgctattagggcctgtcaaccctccccccccccggaactaaagatcgtaactttagtcctggttggtgttaccaaccgggactaaagatcacggggatctttagccccggttcataacaccaaccgggactaaagtcccacccctatatatatgtcttcttcctcctccagctgcccgagcaagcttcaaaatttcttcaaaaaagagaggagatcatgccaaaatttctagtgaatttattttggtgattatatacaaatcggaggtgtctaaaaaggttagcaacttcatcctccaatgttttttttgtcatattacatttggagctatgttttgcatactattttgtctccaaaatttagttgtaagttgatgagagagaaaatttgtgtggggaagaaagaatatatagaaatttagtttatttgctaaagaaggttttataaaatagttgagaaggaaaatatagtgaaagttaatcttaaataatagaaaacaaactaaaatgaaaattaaaagaagtacaacacattaatattagtttaaaactttagaaatactaaataagaactatttggtgtaatattttataatttttgtatgaataatgatatgtcattattgtatgactgttgaaagagtttgtaattattttataattattgtatgactgtcattattgtaagaataattatttgtgtacgagtttttttcatctcatgtagatggatcggcaatggatgtacgctgaccggcggtccaaagagtttattgatggcgtgcattattttttgagaatggccgaagctaataggtataagggttttatttgttgtccatgcaataagtgtaagaatcagaaggggtattctgcatccaggactattcatttccacttgtttgagtcggggttcatgccaagctataactgttggacttgccacggagagcaaggggttgaaatggaagaagatgaagtggaagacgacaatattccggactttggtcagtacgctggatttgaaggaaatcaaacgggcgaggaggaaagggatgctgatggtaacgacgttgcggatgatcttgatcagatgttgcaggacgccaaggaggactgcgaaagtgaaaagggggcccataaattggacaagatgttagaggaccacagaacgtcgttgtacccaggttgcgagcaggggcacgaaaatttggataccactctgcagttcttgcaatggaaggcaaaaaatggtgttagtgacaagtcatttggcgatttattgaaactcgtcaagaacattcttccggagggaaacaaattgcccgagacaacgtacgagactaagaagatagtctgccctctaggactagaagttcagaagattcacgcatgtccgaatgattatatcctatatcatggtgaggagtacgagaacctagaagcatgccctgtttgcaaagaactacgatacaagattagacgagacgatccaggagaagttgacgggcagctaacaaagaagagaattcctgctaaggtgatgtggtatttccctataataccacggctaaggcgtttgttcaggaacaaggggaatgctagaatgatgcgatggcacgctgaagagcgtcaacaggacgagatgcttagacaccccgctgatggttcgcagtggcgaaacatcgacagaaaatttaaagactttggaaaagacgcacgaaacatacagtttggtttaagtacggatggcatgaatccttttggagagatgagcagcggccatagcacttggcctgttacgatgtgtatctacaacctcccccctagctatgcatgaagaggaagtacataataatgccgattattattcaaggccccaagcaacctggtaatgacatcgatgtgtacctaagaccactggtcaaagatcttaaactgttgtggaaaaaggaaggtgtccccatgtgggacgaggacaaacaggaggagtttaacctacgagcgttgctgttcgtaaccatcaatgattggcctgcacttagcaacctttccggtcagtccaacaaggggtacaaggcttgcactcactgtatggatgaaacagaaagtacgtatcttaagcactgtaggaaggttgtgtacatgggtcatcgtcaattccttgctgcaaaccacctggtacggaagaaaggcaagcactttgaacataaggcggaccactgtacgaagcctaaacatcacagcgggaaaacagtgtttgctatggttaaagatcttaaagtagtgttcggaaaggggcttggaagccagcctatagagagcgaagatggtcacgcggcgatgtggaaaaggaactctatattttgggagttacactattgggaattcttggacgtccgccacacaatcgacgtgatgcacctcactaagaacctttgcgtaaaccttcttggcttcctaggtgtatatggaaagtcgaaagatacactggaagcacgtaatgatctgaagcatatggaacaacgcggcgaccttcacccggaaccaaacgagaaaggaagccattacttgagtccagccagctacactcttagcaaggcagagaaggaaagtatgtttgaatgcttggagagcataaaggtaccgtctggatactccacgaatatcaagcgaataataagcacgaaggagaagtagttcacaaacctaaagtctcatgactgtcacgtgttgatgacacaactgctaccagttgtaataaggggtatccttccagacaatgtccgagcaacaataacaaagctatgtgctttcatgaacgcaatttcgcagaaggtcatcgatccggatagattagaagcccttcagaatgatgtggtgcaatgtcttgtcagttttgagttgatatttccaccttcatttttcaatataatgacgcatctgctttgtcaccttgtcaaagagatcagtattctcgggcctgtgtacctacacaacatgtttcctttcgagatgtacataggcgttctgaagaagtacgttcgtaaccgtgctcgtccagaggcaagcatcgccaaggggtatggaacagaggaggtcatcgaattttgcgtagaatttattgaagaccttcgcccaatcggggtacctgaatcacgccatgaagggagactacggggaaagggaactctcggaaggaaagcaataatgacggtagacaacaatttattccgtaaatcccatttcacggttctgcaataatcttcattggtagctccttacatcgaggagcacttggctctagttcgcgccaaaaacatcggtaagtccgatgcatggattacacggcattacattgatactttccccgcgtggctacgacaacatctcatgggtaacgagacgatcaaccaacaactggccttcctggcgaggggaccatctgggtcgatcgcaacattccagggatatgagatcaatgggtacacattctacacaagagcccaagacatgaagagcacgaaccaaaacagcgttgttcgtatcgatgccatgggacacgatggaacaactggcacgtattacggtgccatcgaggacatatgggaacttgactatggtcctctcaaggtccctctgttccggtgccaataggttaggttgactggtggaggcgtaatgattgatgacagtgggatgacaacggttgaccttaactaggttggatactcggacaaaccttttgtccttgccaatgatgtaacgcaagtcttttacgtgaaggacatgtctagcaaaggaaagaagggcagagggcctgacgagccgaagcgtcacgtggttctcccaggcaaaagaaaaatcgtcggagttgaggacaagactgatgaggattattatcagttggatgggcaaccccctttcacggtgacgattgaccctagcatcctcctatcaaatgaagacaccccttactcacgtagcgatcagaaggagggaacaatagtgaggagaaagtacgtgcggtcaaccgtcaccgccaatgtattaccgtaattattgtgtacacgatgtaaactattttagatgtattaattatccatataaatcaattgttgtattgcatatgttaattacgtacgattattagaggttttaacaattttaaatcatgtaattgctagatatatgcgataattagaatttttaaaagttttaaatcatgcatgtggcatttacatatgatacttagagtttttaacaattttaaatcatgcatatgctagttatatgcgataattagaatttttaaaagttttaaatcatgcatgtggcaattacatatgatacttagagttttaacaattttaaatcatgcatatgctagttatatgcgataattagaatttttaaaagttttaaatcatgcatgtggcatttacatatgttaattatagtttttaacaattaatttaatatcattcatatgctaattatatatgattattagaacttttattaattttaaatcatgcatgtcgtatgtatatacatatgttaattacaatttttaacaatttaatatcattcatatgctaattatataagattattataatttttattaattttaaatcatgcatgtcgtatgtatatacatatgttaattacaatttttaacaatttaatgtcattcatatgctaagtatatatgattattagaatttttattaattttaaatcatatatttgcttattacgttttatccacttaatttactacatacaacaataatgtttcgaagtaattgtcattaatttttcgactttaaataattttaatgcattattttctattttagaaacacatatgtaatggaaattaatattcagtgcgcttatcagtagtctcggttcttaaccctaaccgggtttaaaaagaatttggaaatagcgggaaaatatctttagtcccggttgatgagaacaaccaggagtaaagatatgttgttctcaacaaccggaagtaaagatatctttactcccggttgttgagaagatctaggggtatatatattcccgatacgcgccctcgtattctccaccaacacttagaagttttttccccgatcgatctctctcggcttctccttcgccgccactgcctagggcatctccgcgccgccgccgccgtcgtatctcgccgtcgtctcgcgcgcgtcgtcgtcgccgcctccgccgccgccgcatctctggggtgatagccgccgccgccgcctccctctctctctcttcgacctcgatctctctctctctccccaaaccactgccggtcgcctcgttgccgacgccgccgccgacgtcgtcgcggccgaacatgactccgccgcgccgacgatgccgaccccgacctcgatgcggccgtcaccggcgacgacgtcgcgccggcagtgccgacgaagccgcgccacgacgccgggccgccgtggcggcacgacgccgggacgccacgacgccgccgcggcacgccaccgccgcgccgccacgccgccgccgcgcacgccgccactgccacgtcgcgcgcttcgtcgccgccgcgccacgccgatgccgcgccgccacgccgccgtcgcgccaagccgtagccgcgccgccacgccgccgctctgctgccgccacaccgccgctccattgccgccacgtgaacgaacgaagaacgatcgtgaacgaacgatatgtacgtgaacgtgaacgaacgaacgaacgtaaacgaacgaacgaacgtgaacgaacgtgaacgaacgaaacgtacgtgaatgagaacgtgaacgaatgaacgtacgtgaacgtgaacgaatgtgaacctaacgtgaacgtgaacgaacgtgaacttaacgttgtatgtgaacgtacgtaaacgaacgaacgtgcgtgaacgaaaagtgaagttaacaagaacgcgaacatgaacttaacgtacgttaacgtgaatgcacgtgaacgaacgaacgtaggtgaacgaaacatgaacttaacgagaacgcgaacgtgaatgatcgtgaacgaaatgtgaacttaacaagaacgcgaacgtgaaatacaatatatgttactttgcgtttatcctaatacatctttttgtatgttgcagaaaagacgttgtcgtcatcgtccctcaagccggagtggtagatagccctcgaaggaattcgcgcaggcaagtgatgtaaatatatgattattagatttttaatgcaattaagactattagatttaatatacgacacttagacttagcatatatgattatctaggtttgtaatgtacgacacttagacgacttagcatatatgattacctagggttatacgacacttagacttagcatagtataagattattagatttgtaataaaacttagcatataagattgtttgagttagcatagttctaatacggatcaattgctacgaggcgcaccaatcgaaaaggcggaagtgaaatacatgtacgaattcggtaaaccgtttgtcaagcctgagcagctgcagtccctacccacacaaatgtacaagttccatcaactgtacatggagatgagcgccaccggtagagggatgatcggagcgaggatcagggacacggacttcttgcaaggagatgacattctctagatcaatttcaagggtatctacgaactataccagctggacgccctcgacgtctctattatgagttgctggattttgtaagtatcgttcagttagatttcttattacgtttcctttaattaattaggtccttgtatataagtagactatatataatatatacttccttttatcgttgtagaatggagattcaaagggcccgacagcgaggggttttcgatactagattcatcgaccctcggaaagtaaacgtcgcaatactcgaccagtatccgcaagccacagaggacaatctcgtccatctcctgaaggcgcagcattacaagacattcatactattgccgtacaacacagagttagtttttactgtcttgctataacaaatttcattcccgtacgaacatgctaagtgtttcatatgtaatgcatcccacgcacattgcagattccactgggtccttttactcttcgacctggaggcctgcaccgtcaacgtatatgactcaatggataaaaaagagtctatgtttgacaaggtttttgaacttatagacaggtactgtcataagttcctatgttaattaagaatcttgttataattaattgctactacgaatcatagctttaaactctatgtagggcttggtataggttccgccatttggtccgtggcaaatggagagaaagacttagacggaagttcaattttcctgtgagtacacatgctctacatttatattcaatctccaattcaaatacatacaagtgtatattaattagatctctcgccgtttgtcatttatttatagtgcgcaaagcaaaagcagggaactaacttgtgcggctactacgtgtgcgagtattgccactgccttgcagaccaaatcatcaccacaagagagctcgatgtacgtacaaataaattcaaaatttcattgcgtacgtatcgatttgttgtttaattactaattaatttcatacattcatatagtttattcgcatgagggataacctgatcacacacaaggaatttatcgcggcagttcaagaacaactcatgggattcatcaacgaacaaatccttgatcccaagggtgaattctactacgatggaaatacaattcataggtccttagcttctgagataacgactactactacgtcgaaattgtagctagctaggacatcataatggattgtaattaatacatgtctatttttctatatgcatgtacacattttctttaatgtaaatatatattttggtcatacacacacatatatgcatttgcataacatatatatgtataaatacatatatattatgcatgtatatgtttgaaacatatataaataatatatatatatatatatatatatatatatatatatatatatataaaccatgcagcaacaaggccatgcaaaaaaaaacaaaatgtcagctcgatctttagacaccaacagggactaaagatcgatatttagtcccggttatttcacccgggactaaagatagcgatctttagtcccagattggtagtcccggtttgaaaaccaagactaaaggggggttacaaactgggactacaaacgttttctccaccagtgagaataaacgcacaggatagttgaatttgcgatatgattttaacacacatgcaatggatacagtaaatacgcaaacatcaagcattttatttgatgcaacgtcattttctttttctcgcataacccacccacgtaaaggattaccggatgaggacacacaacgatacatgacgtttttttttacaaaggaaacaacgatacacaacttatattgtcactagagacttattgaaaccaccacaagagtcttgactctgtttgaccctccacgcatgcatgcagtgtacacacacacatgcatcaagttgttcacatattttttccatagccatatccatagccatagccgcctatggctggtgatgagccgctatattcatcatcacttctggaggggatcaccgaccggagaaactgcagctctgcgtcagtgaatgtcggtccaccgggcgtcagcggtgtagctgccgccggaggaggcggcgccaccctcctattcccaccagccctctcaaactcacggtaaccatggatgtaggcatccatggggtcgacgtagcgatcgaagccaaggtcgccgaatgagcccaagtagtcttccggcgctacggtgcggcggtgctctgccttggccttctcggaggcctcgtcgccgacgaacccgacgaactccaccgcgcaatcatgggtgagacccttggctgctcccccgatcttcgctttccctgggagcaccttctttatcaggcgtacgaggttggccatcggcagctcggcgttggtcgcactacctcccaccccatccgatctcactgccgccttcttgacctgatccatgttcctgccacctgacatccaaaacaaatgaagaggaacaatcaaaatgatcatccgattcttaattaccactttgaatgcaaaaatgatagtagctttttgttgtgctagttatcaagtactaatcctagtactgactatactactataccacgctttttgttccctgccatgctctctcaagtctcaatgacctgtactatgcttatgttgtgaacttgtattggattgtgatggctctctctcgctctatgcttgggcagtatttataccaaaggacttacatcagggctgcgccggcttggacaaatgcaagcagccagccacgtcaaaggtgcagctgtggcaccaagaggaggagaagtggctgccagattgccgcagaggcggtgagccatagtattagcgttacaatcaaggtaggagggacttcaattttgaccggcccctgccttgcatgactgtgcagtttttgttagcatgtcacctaccagtaaggtcgccaagaaggaagcacaccatcaaaaatggatgtttctgttgagggaccatgttaattcaacgggcttgggtggccaggggacgtaggcatggctcctacatgtcatcccttcggtgcaagagcacaactgttctactctaactataaatgcttggggtaggtggaagcaattaataatgaggatatggatgggaggatttcatacatttactctacatcttaaatatgaccttcatttcaaaatatatggtatattgtgagttggcacgataatatcaaaatatatagcatattgtgagttgacataataattttaaaatatatggcatattgtgagttggtatgataatttcaaaatatatggcttattttaagttggtacaataattaaggagggtgcataactagaaagaagataagttgacatgacaataccatccataccttagaaatagatgagaaaatgtacgttggtgtgtcgggatgtttttattatataaatataggagagatagggtgtgattaattagagctaataagctaagtaaaagaaacaataaattatatgcaagacttacaatctgcaacaacaatttttaaaatttagtaccttcaaaatatattagagctatgtatgaaactatctccctttttttatatatgacatggttgacttttaaacatgatgcgaccaatcggcttattaaaaaatgctctaagtatcatttgttttgttgtggcttgttttacattaaaggtactttacgcattgtgcatatttgcactaaatctttgtacaagataaattgttaaatattgtcatattcaaaagttaacaatgccgtatatttaaaagcgaaggagtatttagaagattcaactttgtaggagtagatgccttccaaattacttatcattcaagcattagacatctccaaataattctttcaatagtaccttcaaaatactaaattattcatgaaagacttatttttaaggagaaccttaattgaataacaggaaggaaaatgaaattgttgagtgcaacagttgcgaggagttctaaaaaaacagttatgagggaaatgaaggctcatgcttaaccactccattttaacacaacatcaacccaatataacattatatttggaacatattgcttaagtattttctaacaaaatggggaaaaatatctcatacattgaagcggggaatgtattgtaggatagcacattttatggagtgtacagaaggagtaactaaccgcatcttcaaaaacagggggaatatgtcatgagcgtactagcggactgacgtagatcctctgacgtaaagagttcacggtgcgcatttgctgacaatgaatacataggctactcaaacctacgacattcctatagcaaattggaggattcacatcaatgcacatatagtgcgagagagtacgtatgttcacaaggctacaagagccgacattccgattgataaccatagggaatgtagatgtcagtctataattatagataatgtccacgtatgtaccaatgtcaatgttcacattatttcttttgtaatgtagcataatttacatatgtcaacgatagttacctttgaggttgtcatctataataaattataaacttatatatcatatgctaccctttgcctcttataatgaacaagcatcacccctgcatactgttttcaaaaggggagaataaaacaaaatgctattgttgtttttggcccataacgaaaccatgggcccagtccaacttagaaagatggccttttggaccaaatagaacagaaggccaaaaaaccaaacaatgattcaggccatattgaaaaggtattttatgaggactcaattctttaattaactaggtgattccccgcactttgctgcggaaattcctaagtaataatcgagctaaaagtaaaaaattatattagttattagcaacacacaaaactaatttgtcaaactatattcagagagaagtatatttagtagactctttatgagattgtacatgaaatataatatcccacactttgattttatatatatatatatatacacacacacacacatacacaaactattctacacccgggtatagaatagctattctatatccccccctccctcccaagggccaaacccacctcccacctcagtcaaaggtcagtcaaagcacccccgacgtcggtcaaaacccggtcaaactgcctaccaactcccccaccacccacctcttctcagctctcgtcttgcgaaacagtgcagtaaagcgacagccatcgtgcagtaacactgtgtcttacgtgcagtaacaacattcaaatttagttgaaatatagtcatgacggatctatttttgataagcatttttttctaacatcatggtgcaaacggttttaaaaaatcatacatcacatgagagatattgttattcgaagcttgggttttttgatcttaactctccacaagtagcaatactatagcattactacttgttagtactatctgttatgcgttactacaatcccatcgcgacgttactgtaagtgtgtagtaaaaaccataagttttgtagtaacaatgcgtcttactgcaatttatgaatagtgttactgtataaacatgtggtaacgtgtacctgccatgtagtaacacttccactttgtacggtaacatgtatatttagcatgtgagacttttaacccatatttttcttttgatttctggtttactataatttcaccatgatgttactgccaaaggtacagtaacgttatatatgttctacagtaacaaagtgttttactgtagttattggatagtgttactacgtaaacatgcggtaatgtgtaattgtcaggtggtaacgtgtatatgccgttcagtaacacttttgcttttgtgcagtaacaagtatatggttagaatctaagaatttgaacccatatatttttatttcaatttctggtttagtgtaattcacatcaatattactgtcaaaagtgcagtaacgtcatatacatgcatgcagtaacactatattggagggaggagaccggttttcttaagaagaaggaggaagagcgatttcttaaggaggagaatatgtagatgcattttgaagtttaaacctccacatgcactacagtatcattgtgaaaacggttttaaaaaataatacatatcttgtgagatattgcttttcaaaaactggcattttgaactttaatcctccacataccataacagaatgtgtaacttgcagtaacaagggcctatatatgcagtaacatggttttaccaaatgtataaaattgttcaaaacactcctacatcaatcagacctcgctcaaagccatcaacagactttacctataacccacctattcgatccttatctcttaaacatgacatagtaaaactacattatcatacagtaacatagctacttggaagtggtaacatgcacctatcatgtagtaacacttctacttttgtgcaataacaagtatatagttagtatgtgaggctttaacccagtaataccagtcacttgactataataacaacatatatattttgtagtaaccggacgcgtatcgttactacatgttctgtgccaaatactacaaggatttagcacgtatgagaagataaatttttactaagaaaactctctcacaattgagaaatagcctactggttagtgccatatggtaatttgaattaaaggtcttgagttctattcccattgaaggcaaatttttcttttatttttttctctctcaaaaaaggggaggggtggaggtgggatcgggagaaaaaaaaaagggagaggtggggggaggaggaatctcgaggaggcgcgtggggtgggggggaatcgtgagggggtattgaatagtcttactctatatatatagagagagagagagaggactatgaaaatgatggatatatacatgttaaaaaattttgtgaaaaataatgtgaaggaagatgattggatgttgattcgtagaattcaatgaattatagattacgcttgcataggttttgcatgtaattattgctagtggatgatgaggtggtatgagttttaaaattagtggattataattttatagtaagttaggattctcaaagctagataggcttcatgcctctacctagtttgaccattattttgacccacatacgttgaaataagatcaaaactcaaaagtaggttttgtggggagatcgtcgttttgtatctaccttggacaaatgacgtgggttggaaccatagctctcaccgttacatattataatatgttttttactttttcctaattaagcttatttaatttcaattaaattatagaaaaaattagcaaacatctatagcatcaaattagttttattaaatttgacattgattgaatatatgttaatagtatgttttgggtaaaaaaatgttactatatttttctataatcttgactaaatttaaataagtttgattagaaaggaaaagtcaaaacattttataatatgaaacgaagggagtactagcgcactgtcatgtctgtttttgagaattgaggctcgagctttacttgtaaaactgaatcaagagttcaaaacgaaaactgtccatttttgaatgtataatagactactactccaagtttatgcataacaagtttatgcatgtccaatgttttcatgatctctgtgttgcggtacttacatccccggagaaagtaaaccatatgtctacctagtacaccgtatcaaaaaagggagagtaggaaggcagctaaagccggtgctcacatcttctactacgttctaacgtgttcatctttccgtataatcctaatccgatccatgcacagtccagctcggtttgcaggaaccactttgcttcgctttgatctctttaccacactcctacttgcacttctttaagcaaagatcgcatgctctctgttactctgtttactgctgactattgtgtatactactactctcccagctcttgcagtgcccttttagcaagatccaaaacgtaccaggcaagcaaattaagaccggagatgcgttctttgcaggcttgcagttgcagccttgctgatttgctcaatctggctgcaaaggaaaggaaagataactaggagtcggtgatcagtttccccttcagtttctgcagcccagctgtagtaataacattcgtacctcgcctcagatctagatactttcgacgaacagcgtgaggaaaaagatcgaaaggaagaaggggaaaaaaacgcaaggaaaggatcgaaaggaagaaggaaaagaccgtcttagctaggcctagctacgctttgtcatgatctttgaattctgcttcccgaactgatgcactcgtccatgcatgggcagctttggctcgtccgtgcatggaaggcaagcatgtgcttcgctgtacaggaagatgctactgatacaagtgaagtgaccagtgggcagtggctattggctagcagcaaaggttgctgagcctgatctgggcaaaagctacggttgagtacttgagttgcactgcttggtgctatactgacagtagtgttcttgtgggtgtcaggcatcttgtttcagaaacgcataggcgcattcagtttggaatttgatttgttcttttgatgcatatctgttcagtagcaagcttgatttaacagtaatcttctttttgtttcacctctcacgttgtaatcttgcgcagaagacgcgtgcagcagaaagacaatttggtaagactgcattttacatgtctacagctgcatgcagagtcattttcccgttcacgtatatgcatatctgaagaacagatgcatttcagtttgatcagatcattacataattcgacttggagttttggactcagaatacagctgatgaatgatcatacgttcgcgtgcaaattaagttgacgacacaaaatggtactactaacttgcaaaccacaattcaacacatttccaagcaccaatgcaccatgaacctaaggtacctaacagtggaaaaactcacgaaatccccaacaaaagtggcacagaaacgtgcaaattcacccaaaatgaatttcacaagacaacgttggtgatcaacttcacagtttcacacgatcaccaattcaccacgaggatggcactggcagccatgagaaacgccagagcgaagggtagcccacgcggtgccgcgccgacgctggcgccgttcttcttgccaccatctcctccgtcgccggatttcttcccctcgtcggcgccgtcgtcggacgacgaaccttgccccaccggcgacggtgcagcgtgtgcaccagcattcggcggcccgtgcttggacgaggcgtccgtagagttgggcttcgactccgtcgccgacgacggcgcctcggcggccggggacgtgatcacggcgctgacctgcagcacggagatgttgtagggcgcctcgtgcacggacttgacgtagaacacgttggcccgggcgtcgtcgacgtcctggggcacgaacgcgacgcggccgccgcggcgcacggcgatcttcaccatcccctcgctcccgggcgcgtcgcccgacgcctggaacagcgtggacacgaccgcggagccgccggggaggcggtgcagcttggcgtcgtcgtagtagtcgacgaggacgtgcagcgagagcacgtggcgcagcgcctcgcgcgggagcccgcgcgccctgagctgcgccatgtgggcgtcgtcgacggcgagcaccgtgatggtgttgcgcccgtcgatgtcgtccgcgaggcccgtggccgtgagctggcggccgaactcggcgaggtcgcggtggtcggcgaggatggcggtgatgttgtgggtggcacggcacgcgccgagcgcgacgaagaggaggagcatgacgtggacgacgcgggcgcgcggcattgtggcgctgtaggagaggaggaggaggaggaggaggtggtggaggtgggagggagagaagttggcgcggggcggcgtcgcaggtcgcagcgagcgttgctctccacgcgacgagccgttgcgcgcccttggtttttaagggcgaaattggctttgccagatgcgcgtcgcgcctgcaaaacttacgtgtcgccgtttgcgttgtgcatgactgtcctatgcggccagaaaatgggtcgtgacagaatatgtcgtaatgtgtcacattctacatttctgtgagttttttttcttccggggtccaattttgacgtcattctccctctttttagtttttttggtccagttgcattgatgatgcaagcataggaatgtcttcatctgccgaaaatttcattcaaatatatttcgataagccgtaaggaaaaccattaacacagaatctaaatgataagatgtactatttggagagtttatgattctgagggaggttgcagctgctaagaagaaaaatgagtaaaatgcaccagcggttcttaaacttgtcagaagatttcacttaggtccacgaacttgtaaagcgcacatcgaggtccctaaacttgatttattgtatcatcccggtccaaagctgcgtttgaccgtggtcttacctacgtggcacgccacgtggacgatgacatggattttttttttgttttttctcccttcttccttttttttctctttcttccttgtcgaaaagacgaaaatgcctcgtacacatcatcgtccatgtcatcgtcttttcatagaaagagaaaaaagaagggataagagagaaaaaaataaaaaaaatcatgtcatcgtccacgtagcgtgtcacgtaggtaagaccacggtcaaaagtggctttggacctggatgatacaataaaccaaatttagggatctcgatatgtgctttgtaagttcgtggacctaggtgaaacctcccgacaagtttaaggactgctggtgtattttactcaagaaaaatcattcacaaaatcttaatgaaaagttgtattgtttggagagcttttgattttgaaagaggttgcagctgccaaaagctctctcaaacataccatagtttcatttagaaccaatgtcaggctccattattttggcccaaaactggagtggcaccatctgcgttggaacagctccaaaagggttcctatactaacatagcatagcttactaccatggtggccggacaagagcatgtgcagagctgcaaatcgatcgggccgagcaagggtgaaacgaaacgaggcgggtcacatggcaggcaaaacccaagcacaggtaattccggcccaaatgcaaccgcattcacgtggcagtgtcacccaaccccatgctctctcaagtgctgacgtttttcttctttttcaggtttctgtcgtaatgaaaccctggctggctgccgctgcagaccgggagagagagggacagagagagcatgaattgttcccatcattttggtgatgaatggcttgcctggcagctaacagcaatatccggagcattcatagttattcagttcatcctgtgtgtgtgtggcaagtacagatgagttagatccgtaatccattcattcggttgaagggataacatcgggtggtaaaaatcgaccgagagattgagatttcttcagcgtagtttcagtctgacagcgtcgcattagaacaaagggagtattgggccgtgctactcagaggcccattagaaagtggcccagtgtgaagcttcctcatgggccgtatgtgaatgtaaggcctcgaacggaattcctcccatgttcttgggcctcaaatcaattagggcctcacctagggattcggattcccccgtccaatggcggttccagtcgccggctccggcgaggcggcgacacctgccggcggggctctctccgccgtcagcgcgtcccaaccccccccccccttcccaacgatgaacgtaagtaagcgctcttccgcaattttattcagctagcattggtttttgaggttggagtcatggcgtgcattgcccctgaggtggtgctttcagatggcgctggttcaagatgtaaggagtacgccgtatctgctaaaattgttgaagtggagtatttcttactaatgttgtggtggtctggtctggtggatttgaaaacgtttgctccgacaaatataatcttgcccggcgaaaaaaaacaaatataatcttttgttgttcgtggtcgacactactttcacatgttagcttctttccccacttcttgagagttcagcaagcttgtctgtaaattttagattgaaataatattcaacttatcaaaaggtgaatttgtatgtttttccttcggtgtacaggttgcataccgtaacgtgttccaactccttgatatcttgcagagagtgccagtgtttcccggactgtcatttctccagtgtgaagatcatgatgcccaatttaagctgatgtcctctgagggacaagctaactcatcatccatgtcatattctcatgcccattgtaagttacccttccagtaaccttaaatttccccaaaaaactggcacacccatattacaattttgttttctgaagatttgtaccacatgtaattagtagtcctctggaataattgttttttccatgaagtgcaaatcaacctaaccgaggaaaatgtgtgtatattgtcttgagcgtgttagtgctccatagtgtaattgttcccttgagtaatattatcttttccttaccagaaaaaaaaacttgtgtagatttgataacttcagacttgaaccaattttccctgccaaagctagcgtagaattgtctttccagatccaagggggccaagcaacagagtcatcctgcacaaatttgttcatgggtaggctccaacttggagactggattaagtatacaatctattactccctccgtttcataacataagactttctagcattgtccatattcatatgaatgttaatgaatctagacatatatgtgagtatagatcattaacatttatataaatgtgggtaatgctaaaaagtcttacattatgaaacggaggaagtactactaaacaaacacagcagttgattttcataatctgacctgcagggcctaatgatctcaccaatatcatgtaggagagaaatgtgcctcttcgagcatctcttcatatggttcttgtttctctgctgatgctatgagacattcaggcgctgcgcagaattctctgcatgatcactgcaaccgaagaagaaataatactagcaagttaacatggaaatcaatagaatggagcagtcatttatatatacacaggtaagatctctcaccatcaaaattgcttagccagcaacatcagtatccattcaagctggaacaaaagctgtttgtgcatgccagattgccagtcaatatcacagtgaaagctaccatggatatgaaacattcaacatttaacatattgactgtcattggctcatatgtttggaaatgcattaatggcatgattatctggctgcactgcaccacctgagctgtgcccagggcagctcagcatatatcacttgctaaatatgaatgcagtttcatttgctgccatattgagaggaaaaattcaggtcaaatgcgaatttgctgacgaaacatttggtttttattccttcagattggagaccttcccaaacccattgctagtgcagagctaccacaatctgtcaatggcctcttctggtgtctaggagcttgcattagcccaaatggcccaagaagcagctgccaaacgggacactcacatgtgggttcatttgcctccgcataattctgtcaagcccatttcgtataaatgcacgccatccacagtgttcctgacagtaagtgatacgttgccatcgtcgccgataaaaacaactgatcctcctcagttcggcgtcgttaaacagtgccgagagagaaccactgacacatgaacagacgaattattattcgggcccagctgattgcacacagatgaactcactctcatgtcgcaattacagtactcgtgcgctgttactgcctcttgagaaagcatggcatccagccattcatggatcatggtggtacgagtaacttctgaactgtgccagcctgccagctacagagcaactaccagtggcgactggcgctgcgccgtcctgtccagctcttcccctgccatcaccttggaccgcagtaaatagcagcaacagaggcactaccagtaccagtacagtacggagtgtattatgtgctgtgccatcaatcgcactgctcgcgctgcgtcggagtgaatgtgacgactggtgctggtgccaccacagctcctgtgacagtcggtgcatggccatgataaaaattcctcccgggaatactaccgtttctgcactgcactgcagcattgtttccggtggtaggagtacacaggaaaattcctattcctctgctcctagcatgtgaccagagtgccttcatcacaacacaagggacactgacagagctactgctcgtactcggggtgtgtttagtccatgagcaattctacggtacttgagaaggtaccatgaggtaccaaatttaaaatagaaaaaatagtacttcatggtatctcctcaagaaccgtaaaattgctcttagtccataccaaaattgaaaatttgattgaaattgaaacgatgtgacggaaaagttagaagtttatatgtgtagaaaaattttgatgtgatgaaaaaattaaaagtttaaagaaaaaatttgaaactaaactcggcctcgttttaagaaaaatctgtacttcttctcttcgggatagtacacggaaccggtccactttctttctctttcttccgaaagaacaccgggcctcatattcatcatctcgtacgtacgggcaaaccaattaacatcacatctcgatcaggtatatactcggtatgtgttttttttttcctggttggatggtcgccggagtcggcccagtcctacacccggtgtactctagctaagtccggcgagctgggaagaggagcagtgtcgtcagattttttagatttcggagtattggtgaattgtcccttttttttctactgtagtaattaggctaaggtttcaagttaaactgttagtcacatgtaagttgtaactcgaaatcacatcctctccggctgacgacgtcgtcggctaccggcgccgacaaggacgtcaaccgggtaggccatggtgcacagtctgattgcacagttaatccactgctcctccttgtcttcctagcttgttcagacgcatctcctgtgcctctccgggtgggccctgtgcagcatcaacagttcgcctctgcgagatgcgtactaacggcagttttttattttacaccctaccacatttaatatttagacacctatataaaatattaaatataaattaaaaaataactaattacatagattgcgattaatttacgagataaatcttttaaacctaattgctacatgatttaacaatgtggtgctacagtaaatatttactaataacgaattaattaggcttaataaatttgtctcacagtttactaacggattctgtaattatttttttattagtgcacgaacaccacatacgacaccatgtataatatccgatgtgacacgccaaaaatttacacctctgaatctaaacaccccttactcttaaaagaacaatacgtactggagcagtagtactgtaataaagttttatcttggtcgatctgctgttcgttctggctcatatgcatcattgcatcaatgcatgatagggctaagccgtaactaacagatcaatgagaccccttgtcctgatcaaaatgtttaattatagtgctaatcattgctgcaagtagggggagattagcattagtcaatcgttaaccacccttggggccaattcgttacgctgccgtacttgtactcttgcgtgttcgctcgcttctcgcatcacgctgcttgccctgccattagagacgctgaagctagcgtcgcagggcatgcacgcatgcgcccatgccattatgctagctccatgaccggtttgtcctttttgtcctgtacgtgttagaattgttctgctctcaagttgtttctgcgttcgaactggccttgcgtgaattgatcaccagctagagctgcaactttctttttattaatcatccttgagaacactggagaagcaactaaatagacaggtatctgacaaattggttcatctatgatcatgcaaccaatgatactgtagggcctgtagcgagataaggcatgcagcgacggagagtgaaagaatgacaaagagctgggcccttggtagtagggtccaactgttcttgatcgatgaacctataattcgatatgatctggagcactagtacttcgtagtattagctacgagtacatccaggtcactcgaaaagaagaaaaaaacctaaaactgatctgatctgatctgataatcataagtgcttgcagaatcatccggcaagaaaataatatcggagtgccatcactctgctggtttcagatccctgtcaacttcgtaggccggtgacaatgtgcagtgccatgacttgatcggcaatccaattggacattatgaccccagcgtgacagtaatcggtagatgcgacctgctggcgtgtcgtaatcccggagttaataccgtgacacaatattaccaccactgtctccaaattctacccggagtcatccctgcaacgactatgtggtgtagtagtagttcacgtagtacgtttaccatttctaatctccacgtagatactgctaaactgacaaagcgagccgcgttttgcccatgcttaggcctggacgcttggtggatcgtcaaatgcacgcagtggtagtgtggaccggttcatcacagagagagcagtgtacgtaagctgctaagccagctagcgagcagtgacatctccatcaacacaaactccccggagagcgaaaggcacgggccggctgcgctgagcacctagccaaatttaacaaaccaactggtatggtacgtgctagctgactagcccccattaatcatcagatgacatttagtagctctacctttgaccattccaacactcagatttagtagtagcagtgaaaattattagacatgcatacgattcaatggcgatgttgcaacaatgatcgatccaattcagattttttttttcacgcgtgcagtagatacacaaatgttagctttcttggacagttacacgtacctttgcagcagcagaagtgcagctagagaagacaaggaaaagaagaaaaaaacttacagggagaacagtagagtagatgaatgtagtagtaaaagacatactagtggtagctagtggtcgtccttaagaagcgttttaaccacagcttaatcaaagacttaatcaaggtgatcgtgatgagtaactacaccgagctagggtaggtagacattcgggtccgggacgtccgtccagcagctcccggcgttccagtacgccgccggcggcacgtcgccgagctcgaagatccccgcgtccagcgacgtgaacggcgtcatgtcggcaacggtggcggcagtgggcgccgtcgtctgtccggcgagtagaacggaggcaatcccgtcctcggtcttcgcctgcgctgcgaagctgaacaccgggagaggcggcggcggaggaggggcgaacagtgacgcgagcgctgccgcttggtcggcgaaaatcggcgccggaggtggcacgtctgtcgggaaggggttcgtcgtcgtcgtcgtcgtcgtcgcgtggtttatgacggcgatggtgttcgacgacggcgtggccggtgtcgtcggggtcgtcgccgcggcggccgtggggctcgtgttgccgctaccgccgctactggatcgtggggacgacgccgaggcgcgccgctggttcttggcgttgtcagttgccgccgtcggcgtcgacggggccgaggacgcagcggacgagctgccgctacgcttggtcttgcggcagccgccgccgacggggacgttgcggaggacgccgcccttggtccagtaccggcggcagctcttgcagaagtggcgcggctgcgagaggttgtagttgttgtagtagcagaacttggtgttggtcgactcgcaccgcgggcacttcaccgcctccggcgacggtatcccgccgcaccgcgacgccgggccctgctgcgcctgcgcgcgccggatgtcagccgccgccgcgccgccgaacagccgcccggcgagccccgggatggactggaactcctgcatgaggcaacgaccgatcgatcgaagcagcagcagctagctagctagctaagctcgctcgttcggttctagaacaatctagaatcaaacaccgcctccacgcgctcactggatcatcccgctatcttggtgggtgcacgctgccttgtcgacgagctgagcgcgcgcggcgagatcgagctagctccacccgctcagctcctctgcatcacacaacacgagcgggtaaatatctacaactccggccggcagcaaaattacgaggctgtccctgacaatgacctgaccaaaatgccctcacacgccggtacagttcattaccctgtactgtacgagttaaatgtaccggcatatgaacggtacggtggccgtgtagagagctatgcgctcagatcattctgctcagcaacagtgtcacctgtccccttgacgtcttaacctgcgtgttatgtaaatctgcttctcagtagccattggttcagctaaaagttttaatttaatcgtgacctgtgcagtgcatctgcataatgtcgagagagatcatcttgttagttgttggacttcccaggataacgccatgagggttcgcatctattggttcgatcagtgtgttggccggaagaggcaacgcaagtggggcgggccgtggttgaacctgcgcctctcgtttccgtcgacgcttttggctttctttcgagatggtcacgtagaaccaaccactttggttttccattttggaatgctcgctgcctgtcacgctatcgtggcaaacattcttaactaacgtatctgatctgcacagaaaattattgcacacccttcccgtcacggttgcatatatacagtgctcctccaattctgtaatttgttctcaaaattacagtaatttttgttgaagacattgatgtgtgaaggcagcagctagctactggcctactgaagtaatctgcatgcgtctgtcatcgccgtccatatagcacatggcgggtggctggagaatcgaatttggcagggtaggaagaagcgtcaggttagtgggaagaagagaaaccgccaaagcatgggctgtggagagatggagtgcacagggcggcgtgcggcagctagcagggccggcgtgtccgtccatgaccccattattaattggggcgaacgatatagtcgccccggcgcccgatcgtgtcgcggtcatgggacgtcacgcggagtcaaggaccacggctcacatcaacgacgacccgcgcgtcgacctgccccctccccgcccgtgcaacgctcgccctccgtctccatcgatcgatcgcgcgcgcgcgcgaccacgcctgcgtcgatcgaccgctctagcttgctacacacgcgtaagcgcgcgacgacggcagttgatcgagcttatctagttctcgatcgctagccggagcgtggtggccggtaagtaatggcaacatcggtcgggtgggttgttcgcgtcgggcacgtcgcgctcggtgcgacagtgcggccggcgccactgcgccagcgaggtcgctggaacttggaaggtatcgagacgtactgtacctgttggcacgtagagtagtacgtatggccgcgatcgatgacgttggaaacatcttgcctggaatagtaattgcggccacatcagaaaacgcaggacacgtcggcgaattgaacgtgcgttacaccttttttctcctcagtccggctcgctctacggacgggttaacgtcgtcgctaattacagcagtagtgcaagccggggccgcggggcgcgggggcggtgggttccactgcagaactgcacccggccccgtccgtctagcgatttgggcaggcttaagctaggctgcgtgttttgctgtccaccctgcacccgcacacgtccgcgctgtcgcgtcgcgtcgctccttgaaagcgcgggtcgttttctcccgcctaccttgctgcgtcgtcctaccccgggccggccagggccgtgcccgcgcgcacgacgtccgcttgcgtgcgtgtttccggggtaagattgcgagcacgacattgtccacagcgtaatagtacgacgacatcggcttgcccggccgggccgggaggggcccccgtgccgcggccgggtacgcggccacgcctgatctcagtgtacgtacctgcatgcgtcaggcgcacggccgtccccggcgcgcctgccgcgcagcgtgcgcacacgcacgcacggacgtgcgcgagccacgacgctgcctgcggcccactgtttgttcgccatccggggctcgatgcagcagcgtcccccggtccaacgtcggtgcgcactgtgcggctatgcattcacctgcaaaaacgtacgtatttggcccacacctgatgcaagatgcgtccatggaggcggtaggcatggacgacccggctgcagggctgctcgtatacgtgtgtggataacgtacttactacgtgctgctagccagctgccatggcaggccatcctcgatcccatgcaatggcaatggatgcatcgatcctgtggaaattggaaaatgactaccccaggccaggcctagcttgtcattttgttgtcagcgtggaaacttcaattccactgttctaacatgcatgcagacgacgacgtacgtacgcgcgtactcgtacttgctgtcgaccaacccgcggattgaaaacgcttgggaatacgatgatattccctccgtcctaatatgtagcaatctaatccatcattgattcatactaataaaactatatttatatttatagttccagaatgtgttattttaggttgctatatattagtatagagggagtactcagtagcatcgaacttacatgtagagtactcctagacacggcaggggattagtctggtggttgcagctcattagtactactggacaatggtaattgactaattgatatttggcgaagtaactactcatttcatcctaaaataaatttatttttcactcgttctatacataccaatacaaaacctaaaaaactatgtacccccaccgtacactactacataataaatttttacagacgttcaaaatcgatttacgcaagcgtctgggtggcccgcttgcatataggtgctgcgaaaatcaatattctttcatgcgggtagcgcaaccgcttacaaaaattatattttcgcaagcgggtgcttaagacatatgtctgcaaaaataattttgatgaaaaaaagaattccaaaaaaaaaatccaaaaaccctagaacgccaaagtcgacactcccaaatccactatcatcatcgttgtcatgtcgaagcctccaccgtcatcgcttgaaatcattggatctgtccctcccattggcagatctgcgcgcaaggggggcagagaggcggggagagctacacgagattgggaagggtcgtcagatcgatctgtccttcccgtcaccgtcgccatcggatcctcacaggagggggaagggccaccggatccgtccctcccatcgatgctactggagggatttgaacagtccaaggccgtcgttgccaggagtagaagtgggaaagggagtactaggagggaggagtgctaggcctaacaggagtaggagtaggagagggtgtgggagggagagaggttggacgggggaggaggggagaagtgagagagggagaggaaacggaggaaaaaaataatggcacgagagagaggagcatttccgcatactcactacggtagagagaaacatctgactacgcaaactcaatggcccgcttatgaaaataagctatttggcatgcatgcctcttaagatgtttgctgctcacactaggaaattgattattgcatgcgaacaccattatggttcacctggagcttctaggggtctcgtttatgaaaatcaattctgtagtagtgtcatcaaatctcagtgcggttattcctcttcttttctactcacacggtatataccatactttcacaaattcccatacgatgattatatattaaaaataaacttttttaggataaatggaaatgattaataataaacttaattgttatgagacggatcgagtaggtactaactagttatggtagggttctcttgtcttgcataggtacagtacatacggtttaggtagctagtgacattcatccgttggcctgctcgagtatgctcggtccattttggtgccaattaacacatgtagctctgggagtagcccggccggtgtgaggagcacgaatcactacggcacgtgcccggttgtcgacatgtctcggtcgcctttaattctacgtacgtacgaacgtgttcaagaccattcgcatgatctcctgctacgttagctactccctccgtcccaatttcgtttacggatcggagcgcgagtctcgtttttttccctgttggacatagatgtgtaacggtcgatagatgcatggattcttctctatgagaaaaaacgatcgagcacaagaccggattattagctaactagctctgggtcgatggcttatcgtagtacttgcggtgtaatttgttaggtcaaatagctccaccgggtacttgtcaacatatatccgtcgtgctcgatcgatcgatcgatctcgatcgagtgatgcttaagcaatccatccatctagctaggacacactaaggttaatgactgttaggtgaggtgatgaacaggtgactggcgatgcgtatgatcgatcgatgtggccactcgatgtccaggcagagcagaacacaccgcgcctaacaaagagctcaattcagctcgaatcatctagctactgactggcagagtcgtcctccttgttggcctgccgactaatattgttaaaatcagatctgctattagtaagcccctgacgaaacatatacatacgtactcctacacatggtgaattgacagagagcttagagagattatgccgcactgatcgaagtatcgaactgacgagttagcagctcgctagtgtgaaggagcaagtgtagtagtggtggttagacgcggctagccagacaagacagcggtgacagacggcgggggaggactctgcgcctctccggggatcgcccaaaggccccaatcggcgttgctttcggtgatccccccgctagtgatggatggctgtggatacatcatgtacagtagaaagcgacgccacggccggcactggagccggcccggccgtcatctccgatcatggttcggtttctcgacgagatctcacgatcctaattgggccctcccaatgcttcttgggaacggctgagaaaaatgatccatttgagtttcattatattgctttcgaatctagttaaaacaagcggattgtctcacccagttttacacttgattagacaaaagtagatttagatttggtgtacagctcttaacttttgatttcataaagataactgtaacttatctcgacgaaatgctttaacttgatatacatctcttaatgtatatttcaatagatacagttgtattttctatacaatggtttttattaaaattctttgtatgaattggatttcatacacaactatttaactttgttaatttctatacaatcgtatttaatttgtatgaacaaccaatacacaccgttataatttggatctatcaagatatccaccgatcaatacattcactactacagaatatattttcctggacgccctccccttttgtttccatacggttcgtaagtgaaaccgcatgaaaaaataggggacaggctccaagctaccgcccgcacggggaaaagcaatatcccgtgcgggcaagccaaccacacggcccaccgcatttaaggtccaccacctctctctgcccggccgctccacctccctctctccctctctcccactctcctctctccactcctctcctttcctcccactctcctctcctatcctctcctttctctccctcagtgcacggcgcacggcggcgggcaaagaggacagcggcaggcgacagcggcggcggtggccacgggcaacagcggcggtggcgcgccccctcccctccttcccctagcagatcaagcggagggggggcttgggggcggcggatccggcagcgcccgccccctcccctccttccccttgcagatccggcggcacgcggcgggcgacagcggtggcggccgccgcgggcgacagcggcggcgcgccccctcccctccctccccatgcagatccggcagagtggaggcttgggggcggcggatccagcagcgcgtgccccctcccctccttccccttgcagatccgggggagggggcggcggatccggccggcggcgcgcggctctcctcccctcccttgcagatccggcggaggggggggaccggcggagcgtcggcgaccggcaatcggatctatctctcccccttctctctttgttatttgtgattctttgtgtgatttgttcatatgagatgtgttcttgttgatgtgagatgtgttattgtgatgtgtgttcttgtgagatgtgttcggtggcggcgggcgaccgcgacggcgacggcggcgggcctcggctaggcggcggcggattagggttagggtttcttttttcttttttttttcctttttctgtttaagcgcccacacgcgaaaatcggttttcgcgtgcaggcgccacccgcacgcgaaaatcgcggttttcccagacgactgggtgcgcgggctgcccacccgcacgcaaaaattggctagcccatccggaaaaatcggtgatgtagtagtgatttatcgtattctttaattactattagagtttctatcatccagacctaatgcaatgccctttttgcttgccacaggtgtatagtaaatagtaggtagatttgtttagaatttgaatttctctcgatgaggtttagctcgagatacttcatacttgcatctcactatctcagactcttgagatattgattcagacaataaattgtcccctgcaggtccatgccaattgtacgtacatgtagaatctgagttcacatatgggtgtgttagctacagccggctcccaacgtgcatagtacgcacgaaaaacggagcggtccattagcacgtgattaattaagtattcgctattttttttcaaaaatggatcaatatgatttttttaagcaactaacgtatataaactttttgcaaaaaaatctaccgtttatcagtttgaaaagcgtacgtgcgaaacacgagggagaggggttgggaacacccaacatcaaacacaagcacctagttatatcaaaaggtctcactaaaataggagtatgtcaagaaatctcatctgactaattcaaacattaggcgtcaggatgggaatggttaggatatggatttaacctaaaccgttttaagtgagttcgttgatctatggtttaatagggtcaatccatcatgagtccattatatcaataggttatctatcgatatccaaattgatcggctacattactaatagacaaaaaaaaaactcttattgcatgtatgtaaaactcgaacccaaaatatttaaactcgcgttcacactataaaaacttatcgaattcaatcgaattttagtgggataatttattgcacaaagaagtaactttgtgtaaattttgagcccttttatacatgtggggcccacgatgcattactaagaccaaaaaattctagttacatgtgtgtaaaactcggacacaaaatttttaaacaaaacttgttaaatttagttgaattttgtagaaatgaattattatatagagaagcaattttgtacaaatttttgaaacaattatacgtgtgaagtcattttgggttgaaccccttaaatctaggttctaatgatttgatccgtttgatccatttatatttttggaatgagcctaaaaattcgtcaggacaaatttatggatagttttagtggataaatggatcgaccctaaccattcccatcccgaattaggcgcaaatccaacatggttcttcataaaattcccaacaaatgaaacacacatgctgctctctctccaacttccccgctcacagttggcctacacctcaccagtttctccaaagccattgcttcctgcttccctctacattgtagcaccgatgaacttgcacctcatccctcctccgcacgacggtgttgaccacaacaccattaatcttcctcatcatcaataaagttcttacgtgccaccatcttcccctatcttgatgataaagacactacaccattgaccgcctccaaaaactagttgtcataccttccctattagtatgttgattttagttcaccatcctcctctaggccacaacttcagatgaaccaccacttttattagacatgactctaagcaaactactaccctaaccataaattccaaacccaataggccaatttctacgtattgccgttgcaaagaggagaaggacgctctcattgtagaaaaggggaatgctcttcatcaccattattgctagagtttgagctcaaggaaactcttcggaaggtgaatattggagcatagtctaatggtgagaaattttaatactaggagactgagaaaatagcactactcaaatactcattgactattgccttgttcttatttagaggaaggagtgtttttgcatcgaatggacctgcaacaactaactatatataaaaagtgatttgttttctatcatgatggtatacatcgattttgttggcgtgaaaaggatcatggtgcttgatggtccttttcaccttactccctccgtcaaaaaaaaaaaaactaacctaggactgtatgtgacacattctaatactatgaatctggacatacctctatccagattcattatactataatatgtcacatccagtgctagattcacttttttttggacggatggagtactcatcatcgtcattacttatgttttaatatatattttttaaaattccattgcaacatacaggtatatgacagaataagaaagaggacgagttaatttataacatataagtagaattcaaacttcaccagtgtgccatatccaggggcggatctacagtactatggccggtgtcaggcgacaccgacgactttcggcaaaacttatagtaaaactgcttatccatatgttataacaccataattcaagcataattagcatatcatgacaccgatagacacgttatgacaccaacgaatcgattttctggatccgccactggccatatcatacaatctatgtttccgcggcttgtacgttgcagagcgctgatgttaacgttacatcggagtatctaatagattaatttcctcttatatattcgatgaaaccgtcacatatagttccacgtaccgtctcataatcaatagtgtggatagatagagataactaattaaagttgatcaaagcctgcacgagggggagaggagcatatatagctggctctacatgcaacagcagtgatcgaatgcacgacggcaatgtagcgtgcccatgtgcttttccctagctgtcaagcctaacaaacttccattgttggctcgccttaatgcttggtttccgaaggcaccacgaatcggatgccccctgatagtgtgtgtgtacatcatttgctccctggatcgtcagtctcccgtaccttctcctgtgttattgggagctccaaattaagatgcctttgcctgctatcttgcgccgattaaacacgtgcggaaaaactcgatgtgcatacagcatgtacagatcgatcgagtcccagcaattgtgtgtgccccagcttttgcagttgatctctccgtgtgcatggtgaattggtgattggtcaggatcggacgagtgagcctgagttcttccgagctttttacttagctatatatatatatatatattctcttttgttgtgagcatactttccggttaataaaaagtgttttttcaaaaagaaaatctctatatatatacaaggtttaaaattttcaatcgaaatctatttttaagttttgtagttaatacttaggcagtgaccgggaaaagcgggtgtgcatgtgctcaggcgtgcagctgctctgcatcagcttcttggtgaggtcccagtcgaagattgggatagcggggagagataaattgaggataagggagaaagaagcccttttggaattcattgcttggcgatatgatgcatacggccgtagtctctgcttcaccctgcagcttagctcttgggcacccctgaaaggtacccttatggtcctccctaacccactcttccaatagctgatgatcattcaagtggtggtacatgcgtacgtagtacatgacatggtacatacgaccactataatttccgtacaccattttatccattcgctaactgatctgcttggcacagtcgtgtcttgaaaatgagttaagctaactaggtttttttcagataagtaatgcatgcacaggcgcagtgagctcaattattatgcccttagccacagggcaatgcatgactttgctagtgacatgtagactggattggattgcaggatgaagtgtataccgaatctcttgcagctatagctatgcaagccaccagattggcacatccctgctgccaagggatttgcttgtcacggctcatctcatcagtagtgattccacgtcccctctccaccgtacgcacgcagggggctatgcccatgagagacatagggcttatctggggagctcggaaattttgagaagcatctggtgttggtagtcagcttctgagaatctggaaaagctgggtttctcagcttttgactttctagtttattttctggattctacaactacaacttattaaaatctggaccaaaagttatactgtttaggtgagcttctaattttaggagaagctgcagcagcttgaataagctccctaaacaggctctaaagctagcgtcaaagggaaggctggaatgaggacaaagtggcaacatgactgcttgcgaccctaatcggagttaggtgctgcttttctcgtaagcctagctggttgtcatctggaacagtagcacagtgccgctagctagctagtgccgtagtgcgtgcgtgcgtgcgtgatctgtgtgtgattctgtgagggtgaggacaacacgggagaggaggaggacccgtcaggtgactagctagctctgtagccgatgactccaaagaaaaatgacaggaaccaaccggcacttcagcatgagaaatcgagatcattcacgcgatggaacgcgcgcggttgcggttgcggttttgaagaagagaacaaaaggatggcgtgccgatttcttcttgtgttgacctgtttgtccttcgtcctgtgttggaggattctctttctaaaaaactgtgttttgttactgctctttgttacgaccggaattaaccgcacaattcggtggggatgttgtttggttcctgtagctatgctagtccagacaaaaatctgtgccgaccttatcgtctccggagcgggacggtagcccccaagcctagtcggtcgggcccatcttttttctgtgcctctagagttgtgggccgtgttgtttttggcagtaataagttcatttaaggttactttacttgataacgaattcgattttcacgagaaaagagaggtgaagaggccctgcatctgaggcccacggttactcaacattgttgacttgggtcaattactacctgctatactattatgagacctacattggatcggttttagcaattaagagactcgttgtatatggtatttcggttggaggacgaaaatcgaacgtgctgtcaagttaaggaacctacaattaacttacttcttttgggcagggtttccattcccgagcccgatttaatattagcatatgggccacaatcgtggttagcccatctgccactggtgatgtgagcagtgggccgttaactgatgggtccagtcgagaccaaatctgcacggtataacgagaagtcaatcacgtccttttttggtacaaaatctatgggtcaagagtaaggcactctttgtttaggtttataagccaacttataaatcgaaaaatctaagtctaaataaacaaacggctttttcgtttggtttttttaaagttataagccactctaacactattaagctaaaagctaggttggagaagcttttttggcttatataagatagatgtatgccttcatcactaaacttatgatattaaatccaccggtttataaatcatataagccgataagctgacttaaaaatctaagccaataaatctaagcctaaacaaagagggctaaagcgcacgacgcacgttgcgtatgagaattgttagaggacgtgattgaggaattagatagaggattaaaatttcaacaacaaggggatttggggagagagaactccttcagtcctaccttgtcttccatttttcacaaatcgcaagcaaagccccacaccaaaatccacccacgaaggccgaagacgacgaggcaaggcaacgtcggtgttgtgagggggacacacacaaacactcgaccttcgagagatttccgagcggcagcaatggatctctgggagagggcgcgggccttcgccggggaggcggcgaagcggtcgcaggagctgtcggcggaggcggccaagcgctcgtcggcgctggtgtcggagacggcgaagaagtccaaggagatcttctcggagaccgcgaccaagtcgcgggagatcgcggccgaggccaccaagcaggccgacctcctcgccggccagatcaagcgcctctccaccgacctccccgtcccctccatccccgcgatcccgcccatccccaccgccgtcgcgccggagccggacgccgcggagctcgagcgctacggcatcaccgaagacctccgcgagttcgtcaagggcatgactatcagcaccttccgcgacttccccttgcaaggtgcggtgttttcatggttgggtttagggaatccatggtggtggatttgtctgataggatttttggttgcgcagatgagccggagatgtcggatgtgcccacggtatcgaacgtgcgtcaggatctgaatgagtggcaggccaggcacgccactctcgtcctctccgccgtcaaggtttgtctcagtgaaccatttcttcgttggttatgcatgtgtgtccatggggtattggggttttgtgacacaattgatagattagttatatgaacccgtgtataagccagcacgctgtatacaattgttttgttgggtttactaatctaattagatgcctatatcgagagcaccgaaatgtatagaatgccgagtttataatttgtttggaattctagaggaaatttctctttgtccattcgctgttattacaatgttttgaataaattgaatgctgacttattaatgtctgggaaatgtctagcgtgggtatttgggcttgatatcccatcctttcatatgagcgaagaagtcattaagataaatttgttagggttgtccttgtgtcatggaaaggcagatttgcaggtatattcccttgccgaataccaaaatggcaagctgtaaagttggctcctatagataagctatcctttaaatatcacaatttgaacttaaatgtggctcctaacattgacttgtcaaatatggaagtgattagaagttgcctgggattgctgcttacagagaagtatagttgatgtaccgctatgtggtaagactatgttgtttaaaattgtggcagtaaacatatattaccatgatttgactgttagttggcaaactccgtgtactaacctaactttaaaatcagatagctgacttatgtggagttagtcaaatccgattgccttcttgtgcatcttgcctacttcagaaggatggtgatcctgttctgaactttcttatcacgattaattgcttgtgtttattttgagttactaaatcattaatctaataaaaaatcattaatgcatgcttccattaatatgctgttgtatgaatgtctaattatgtagttatcacgatttattaaatagtgttgtctgatttccaggaaatttcaaagttcagatatgagttgtgtccacgatacatgaaagagcgtaaattctggagggtttatttcttgctagtaaacaactacacatccctgtaagttttctttcttcttagcccatgttgcaatccttgcacagaactgtcaatcttgtgcatgataagtttatataactgattggttgcaacctattttatatgactcctagcatttttgcagaagagcatgtgtaatcattaatcacaccatgattgttttacacatcatatatagctcggacaaattcactgttcataacagatgtcctaacaaaaaagtctgttgcagtctacaacttcagtatattgtttgtcatttatcctagttggcagtcatctcacttgttgaaggaatgcagaatctttaatctgggttgatctagttctgattctttcttcttctttttttgttttacctttcaattactttgatgatgactggaaaagttgcagtgatagctgaattgagttcaattgtttggttgctaatattaggatgccttcttttctcaacttctgtggtttgggagtgaaagtttttgtcttcattgtaaattggcaagtggcaagattgatctgtcttcactgtactagttaaatcatttgttaactgattgacttgtttgtagctataatagacagttgatttgtaaatactagaacagtataatagacagtcttgcacactgacgttggtcactcacagactttaatgtaaacaaaacagctatgagaacaaatattttgaggagctgaaagtaaaagcagaggaggaaaaaatggatgccaagaaggaagtaacagagacctcacaagctacaactgcagaacataaagacatgaaggtgcaaagcaagacttcaacttcaacaaatccagagcatgatttggatgttttccttctgggagatctaggcagtgatgatgagggtcctggtatgctattcattttccaaaactgatgcatcaattgatttgcttactgattctgcagttattttatatgatttttttttcatttgcttacttctagatggtgatgatgatgggttagatgatgacttcgataagatagatggcacttcagtaagttccctgctcccttgaaatagatgtttgctacagaatttaagatggcgtatatttgttgtttcatacataacagaatgtagcttggtatgtggacatatattattggaaatatagtaaattgtacattgggaagttctcattatcctgccaatgcatggccgtatactatcagccgttagtcaagtgtgttcatgaccagccaaaatcttcgcagctgtttggtttgtgctgacagcacaacatcttgcttttgcagggcttagagagtgatgatgatgatgacaaggaaaaagcagcaggcaaggcagaaagtgcaaaggagtagcttgcagagctggtgatcaatatgatatgaagtgctttcccagatctacacatgcttatcatgacaacgaaggctctagcacgcagcttactgcactagtccagctgctattgtataatagatggttgcatctatccattcatttttctcccactgaagcaatgctgctttcgttgttgcatttttcttgtccaagatttagaaggctctattgtttttccgttttctggagccatctagggtgctttgcatatgccaatatacttcagaaaaatcttgactctctgtctctatcttaaattagccccaaaatttcttctcacgtataataaatttccctgtgtgtaggtagctctctacatttataggcctagacctttgtgttgcatacataacctggaatccttgatcctgaatagttccaacatgaaccagtcccagacagtgttgcattcataacacatcggtaattcttgatcctgaatcttctaacatggctgaagacatactgtgctccattcataaatcatatccgaaattatggacgcattcataatatgaaattcttgatcctgaattgttccaacataaaccagccccagccactgtgttgcattcacaatacattggcaattcttaaatcgttatgacattgctgaagagatactgtgcccattcaaacgagaaatccgaacccattcaaaatctggaagtctggatccgattaattatctaaattcggaaacaggaatgttgaccatttgtaattagtgatccaagttgcatatactattattattcaaccatttactgaaacaattagcaattagggattgagggtcggccgtagcgagccaaccctatctatttccacaaattatgccggccatatgtcttgatagccatacagcacccatggatgtatggatgtggcatacatagccaaccgaccctttttaacttcaacccaactcatcccgctcatatttgtagcctcccctcgaccgcgctcgcgcacaactccccgaggtggtattattcggagccgcccttcgctgaatcgctgcgctcggctcgcgcgggtgcgcgggtgctgcttctgggccaccccagcaagcagcccagcccaaatacggctcataaaataacggccctgctcccctgcgataattcaaagtaccgtgtatgttgttattcttcctcttaagaaaaagagagagagaacatgttcgtccttggaaaaaaaatactaatattccgtatgcttgttactgcaaagcagagatacagtgtactaatacgtcagtacaacgtacgtgaaagtataacgtagatttgtctagttcacgtgcccttggaatttggaagcggttcaatcccatccagctagtggtacacacgcggcgctgtttctctgtttctgctctggacacaaaggactcccccaagtgggcgcgagtgtggacaactcgtgatccctcaacattcaaacagtaaaaaaaaagacaaaaaaaaaacaaggaggaaaaatgatacccgggtgggggggggggggggggtccatagatccatcatccattggctccacgcagatcctgctgaacttctgtttgcccttcattgtttcctgttgcattccagctgatgctactaccatctgaaggaacctgaaattgagctggacgcattcacatgctgtcacagactcaacagtttggttgacccgcatattatccatccatgatccatgatactactgctagaacaatcagtcaggtgcatgattaattctttgccgaatttcattccggcatgttgtacagacattaattcctttgtttagagggaacttgggcgtcacattattcgcgttatagtggcagcatcagtgtgatctgtcacctaccttgtatttttaaagcaccgggacgctgtgcatgtgaaaccagcctagagcgccggccgcgggacgtcgagccgagctgtatttgcttcggagaacaaaatcttgcgcacttgggacccagattggcttcgaaagtgatcgcaaagtccaattcgaagtcttgtgattgatcgccaatgatttatcagcatatggtccatcgaacaaagtcggaagacactgtatgagacgaagaactaataacagaagggatcaatcagctacgagaattcagaggattccgtcctccttttttaatccaaaaccagttctggaaatcgtagcaagatgagcctgtaactacaaggataaggaatgttttcattcaaagaccaatcgactgcatttttttttttgctttcctggtaaatggatttgttccatgtcgtcgcacatacaaattcctaatcctacaaggttagctccaaatcccattgtctcgactctcgaggcacatgacgtctgacgagagctcggtgacttatagcaacacgtgaccataaaactaactcattctcctgccatgtgggcccgcgatccaacggcgtccgcgggccgcacagcccagccaggcagccacaccgctcacgtgcaaccgccccctccaagacggcgcccgctgaccccacagcccaccatccggaccgtccgctcgtccccatccccgccatcccgcgccgtccacgtgtacagcaaccgcctcgtgtgcattccaccggtgccgcctaaccgcgtctcccgccggttactcggacacgtcgtcccccgcccgccgaatattaccatcaccgacgcgagggccgaaaataacttcacgctcccccccacgattcgctcctcctcacgctcgcgacgcccaccaccaccgccgagatccacccgccggcggcgccgccgcaactgccactctccctccggcgtggtgctccgacggaggcggtgtgtgtggtgtgggtgggtgacttgccggggtttgcttgccaaagattcggtcgcccagtttaaggaaggtgataaggctgggcggggcaataactgctcgatttgccgccgcttcattgctcggcgaggttgcgggcggggggggggggggggggattcttgccatttctcgccgattcggagcccgcattggatgccggagatcgcgtccttatagctgggtggggggaggcgagcttggttggcccgaggtggcgtctcacggaggcaggtgctgtgtgcgcgaggaggagaatttcgccgagctgtgttgagtggtggcgaggcgattccccccgcgcgggagttcgtggtggaattttgacgtgcgcgaggcgagatgcttgttgggaggcaataatagggtactgaattcgccggtccacgctcgatggggtggaaggcgacgatgggtggtgtcaaggtggccggcggtggcggcggcgtggagaaggtcaggtgcccgtcggtggccgcggtggcgcggtcgcggatgaggccgtgggttctgcgcgccaccacgacggtgctgctttggacctgcgtcatgcagctcacggccgtcggggagaggtgggggccgcgcgtcctcaaggggtggccgtcgtgccggacggcgcaggaggcggcctccgccgcgctcgccgccacgcggctcccaatgccggtacccgtcgtggagaaggccccattgccgccgaaaagtgagtatccccactaccctgctttcgcatgctcgttcttggaaactgccaatctgccatggattcgtagattgctgcatgatgcatacggttttctcaatcaatccccttataccagctaatgtttttttgccgttgtatttgcgccggattgggaaaatgcagccgctcgttttgatgaattatgccgtgttttgggttgttttcatgttaacatcatacaaaatttttggtgcgcttggatgctgtggaattaaacgaaaactcatgtttttcaatggaaattttctaaaagaacaattttcccgtattttcgaaaatttatattaattcccccaaaagatgtgctgtagtttgacattctagtctatggccattgtgacggaatggaaaggaacatgtacctacatttggtggctcaagcacgataattatgtgttagccttttccttttcggtaccaattgtagtgcatttaggaactcacatgggtgaccacaacattagctgctcatttaagagcttgatctagctttttgtagaaactactatgcgactataatgatagtacagtttgacgattttctctacttctggagactattggtctgttcatgcaacaaactttgatcgaacttaatgttagttatggataatccgttaatcctacttttactttaacaaagcgaggggtgtacgtattttgttcactctttgcaagtagttgaatgaacggtttgattggccttgcccgttaattatttttcctactgtaagtttgccacttaaggaatctcaattggaattcaatctgtacttggtaaaaagtaatgtggtataattctgctcgatgtatatagtatgcttgcatgctagtagttgtcctgcttttttgctttcctaatctgtttccattttctgcttaggaatttataggaacaacggttatctgatggtttcatgcaatggtggactcaaccaaatgcgagcagctgtaagcatttaacattttatcatttagttaaattacaccactcaattatgtttagcatttaacaaaacgtgctatttcatgtttacccagatatgtgatatggttgtcattgcaagatacttgaatgtgactctaatagtgcccgagttggataagacatcattttggaatgatccaaggtgcattttctgttttggtattattttacgtttgcctgcatctttctgacctgtatactaatttatgaccatatacttaatcaaactttctttaattttccttttagtgagttccaagatatatttgatgttgaacactttataacatctctgagagatgaggttcgtattcttagagagttgccaccaagggtaaagcgaagagtggaacttggaatgttccactcaatgccacctattagctggtctgatatctcttattaccgtaacaaggttagatgtctatttcactatttgcccttcaattctactttgagtgaaaaaaagggtattgaatttaaattcactttgtacagatacttcctttaattcggaagcacaaggttcttcatctgaacagaactgatgctaggctagcaaataacggactaccgctcgatgtccaaaagttgcgttgccgagttaacttcggttcactgaagttcacttccgatattgaagagttaggcaggagagtgattagattgcttcgccaaaatggcccctttttggtccttcatttacgatatgaaatggatatgctggctttctctggctgtactgaaggctgcactcgtgaagaggcagatgagctcacaagaatgaggtaaaaaattgctggttttcaaactatcaattcgagatcatttcattcttgcatattgtttttttttagccgtcacataatacagctgagttactcataatctcagatatgcttatccatggtggaaagagaaagtaataaactcctatgcaaaaagaaaagatggcctttgccctttgacaccagaggagattgctcttgtcctcagagccttggacattgacagaagtatgcagatatacattgcagctggagaaatatatggtggaaagcgtagaatggctgctcttacttcagcgtatcccaacgtggtatggaccaaattgtgcacatgtatctttgatggcatcactggtatcattactctgcagactgcagatctctttttccattttgctgatgtgtgttcttataattgatgctctaggtgagaaaggagacacttttgcaaccttccgatctcatgttcttccagaaccattcgtcacaaatggcagctctggattacttggtatcactggaaagtgatatatttgttccaacatatgatggtaatatggctaaagttgttgagggacaccgcaggtatattttgtacttgatcacacctctgcattctaagtacagtactatattcctacattgtccttttgaacctggacattctaatagtcatagaatgtaaaccgaatgggaggactttatgcaatgttaaacaatttcttttctttagaggtaaagctgattgattatttttctgttacaggttcatgggttttaagaaaacaatcttattggatcgaaaactcattgttgagctggtcgaccagtataatagtggttctatgctgtgggatgaattctcttcactaatcaagtctgtccacgcaaaccgaatgggagcagcttcaaaaaggacagtgattcatgacaaaccgaaggaagaggactacttctatgctaaccctcaagagtgcttgcgagatcccaatcttttacggacatcatgatatttttaatagcgcaattgcgcgagtatacttattaccattacacgtttacagcatagctgaacttgtttcttccgagctgactcaaatggctcggcattttcagttcagaacttcaggttgggccattgacaagggagtttggatggaagctgaaagaaaggatgatacaattgtgagcttgtgactacttaactcaaatgtagttggtacatagacgttacatgttggggaattggggatgttaggtttcctaattacgccgattaagagaagatattcatgtatagatgggggcgggttagtggataagttagttcaacagaacgttaccgatcatggttcatgaaggaaattgttatatatcaggtttttcatactttgtgcagacattactgctcttgcatcttgaatttctctccgtctcctgaagttttaccatgtagtactaccaactgtttcagcagtctgaacagatgctgctggttgttgggtgtatatatgctctgattgtgtattatagaacaccagaatgcacggtgatgtatcattttttttaccacggctgtgctgtggtggtgtatcgaagtaatacatgcctctacttgttaacgtgcgagtcagtgcatcttgttttcagtggcgattaagataggattagcactgatccaagagcgacccagcagttaagtggtcttgtcctactcgttatcgtctcatcgatcgttggagcactcagctcgaaatgcagtgaaccaccgcgagaatagccgctagagatgcgcgcgaatctggcacggagcgcgcggccgagccgagccgagcccatcccacagtgcacggggttgagtgcctcgtcgtctccacttcgttgccgatctctactcgtcaacgcgcgcgagggactcgacgtgcaaccgatccctaggcgatcgctctgctagactgctacgttcgagctcgtgcatatgcgcctggttttgtgcgatggattggaggattaacgttgacgcaagagccatcttgggatcgagtttaatttaattttactagtgctccattcgacgggaaacgtgccagtaggaggcaatggggatgagattgatgaattttcatatggcagtatgaggcaatggtagatccgcaagctgcatagctcgtgtaattagtaaaccatgctggtagatttgtagtctgcttttgtgctagtgaagcagtcagtcaggtaactctcgggtgtggaacggagggaagattaacgtgccacgctgctgcaggctgcagctgttctcccctttcttttacaggaccatccaaatccattaaacgaaaatcacacattattacagttcgtacaacgaaaatcactccatttccttgtgtgtgtcagatcgctgccagccaattgtcaagtgccaacggctgaacgacacactacgggcattacgggccgcgcgcgcggagttcagcttgagaggcgtacaacgccttagcccattacgaaatcgcgatgcatatggtacgacgaaagcctggtagcccacgcaggaaaaccggcaaaacgcgtctcagacgaggcccaaacagtacgcctgatcctttcggcccagtgaacagcacggcgccgcaagctttggcccatctaatgctcttcctgcctgccgcggcgccctcgccgttgccctcccgcaccaggcaccaccaaccaatctcctcgtctcccactcggccacatgccccacatcccaccgaaatctggaaaaatctccacgctcccaaccccgcttcgccttcgccccggtggccgcagccgcgcggcgccactgccccccaaccagccaaactcccccacctcacggcactgcacccgcaaaaatctcagctcccacccgccgcgccgcgccgcgccgcgctgctcccccaaccaaatcccttctccatggcatccgccgtttcgctcctcctcctctcgtccccgcgcccgctccgccgcgcggcgccggtgccagcgctacgctcccaggcgcgccaccccttgctcctcggccacgcgggcgagaccgcgctcggggtatgggccacgcgcgcccgcctgcccgcgccgccgccgcgcgcctccaacccgaacaacgacaacgacaacagcggcgccgtggaggcgcccgaccgcctggtggccgccgtcgcctacctctacccgttcctcgacggcgtgcaccacggccgcttcctcctcgcgcagttcccgctcttcagcaccctgctcagcccgctcgcgccggccgcgcgcctcttccgctcctccccgctcacgcccttcctcctcttcctcaccctctacttcgccgtcgtgcgcaaccagcaggccttctcccgcttcgtccgcttcaacgccatgcaggccgtcgcgctcgacgtgctgctcatcttccccgacctcctcgtgcagtccttcgcgccctccaccggtggcgggatcggcttcgagctcttccagagtatggagagcaccgtgttcctcttcctgctcgtctgcctagtctacggcgggggcgcgtgcctgctagggaagacgccgcggctgccaatcgtcgcagatgcagccgagcgccaggtgatgtgatgagcttttgtcaaatcttgctggtgaaaaggaacaaaggaaaatgatatacacatccatctcgatgcctcattgatgttagtagatcgcaaattcacaagttcagtttagtacagtgattatttacagctgtagtaaccaatttaatgaatggagttacggaaggttggtacaatggcattacaaaatttacaatcaagtgtatgaacgaatgagttgaattgggaatttttagagatagcaatacatatactcgctatagaatatggaattctggactacatttacagatgatgaatgagaaattggggagtgtcctcaagacctcccctgaaggagcttcaatggtatatgaatggatgcttaggttagttaattgttgttgcaatataaataaaataattgcatcaattggggattgtggttgctgctaccaagttattgtctgaacttgatgatgtctgaattttctagtttggagaaaaagttctagcttttattgcaccgcctcttggttatttggatgggctcttcatcttcattgatctgtgatgtgaagtcaggacaaaggtacaaaataattattaagcagacgatctatatgttcaaacatcatgaataaatcaactttgtaaagctctatacctttgagttgtcactagtattatctcttgctcgtttggccaggttgatctctacagctatattagcttgagatggatctagtcctgactttttaagagcttctgtcaatctgttgaataatctgttgcaaattgaagtagtatcctgttagttacatattgtgctaactttagtcttgaagtaacaaatggttaaggaacagacccttgagagtaagcgctagaaatactatggttttcatcgtgaagggtctgtttctcatgcttgttcggcattttgttgcctggttcagactcttggcgcattgttgacatgctcagccatggtggctgattgctgggtgtgctgttctctgcgtttaaaagacattaaagttagtggatctagttcttaattacaagaattctgactgttgaaaggtgataagaaatggacttactttccaaattttgtggtgtgcctgttgccatgtgggaggaactggtggttgtactggttacactctgtgtgttgaagagagcaggttgtgctgccgatatgtgcttgggaccgtactgttcgttgttcatgtcctgtgtggatggtgacaaatcttccccctggacttgactggtgttctgtgagaccatgaacaagaaacaaggatgggtacatatcattggtatatgattatgatgaattgtgcattcgctttcagttgctgtttttattttacggaattacctttgtgtttctccagcatgatctatagtagacttttgcctaccaagaaaaaaaaatagagggtgaatactgttgcacaattatgtcatgaacatgctaacatggctatgatagtacccatggcatggatttggaatcctcgtgattcctttctggatcggcttcctcatacttttggactttctcttgcaaaaaccttatgtattcaataacctgcaaacaaaatgcttcacaagggagaaattgcaatatagcctgctgactacagtgccaaaattgatattctgtttacctccgaaaggaaagaagctttgtctctcttctgatcagtgtgtggcaggagttcacgaagtatttcaagcctgaaggagagcatgaagaattgcattttagaacacatttcttgcaccatatacttatatgaaattgtcttggaattaaatgctgctaatatgatatcttgttgagctatctagctacgtcttcatggttggtttgttcctgctctgcagaaaataattcaaaatggtgtttgacctctactagcttgcctgtcatttatcttggtcctccttctctgctcagttgctgaatgctttgatctcggagtgctgggtccctgatcggcgctgctggcgctacttcttccctctgctcttgttgctgagtgcacatgtatatatcaaatccatcagtgcctgaattgaagtgacagactagagaatcaacaatacaactgcggtactaaccttcatatggtgtctggcctatggatctttgatcaatggcagaatcttgccacatcgtcgacggcgcacggtgagccctactcccagatcttcctcctgtttcatgtgcattctccatcctggcgccatgaagcgcaggtgcaaatgcgaacgcactcctcctgacgccgccatggctaccggcctcttctctcgacggagtaccggacgcgtgcctgatgctgaacgtcccgacgccgcccggtagcacgtgctcctccgagtccgaacctgccggcgacgcgccgtcgacggcactccccgccgccgtgccattgccgctgctgcggccgcgctgcttggccaggtccagtggcctcagtgatctgcggatctccataccgtatcctgcacttgacatgggtaacatgggttagcaagttggtgcattgctgtctaacttgcacaccatggcacttgcagttgagaaggcaaaggagagggcggtgcagacagctcacctcgcgatgaatggctggaatgctgctcctcccggtgctggaacggcggcgacgacgagccgccgccggcgcggagcgagaggaagtcatgagccggctcctctcctgcgaatcaccgacaagcacaacacaacacacggcaatgtaccatgagctgatgagcatcatgcggtgaagagagaagacgctgtggaattggaggaaggaaggaaaggacactagggtgaagtgtaattctctttgataccttggaaaagctgcattggcgcccgggacacaggacactggagatctgtcgacgctgctgccaagccgagcggcctgccgttgcagcagaaagatggcgcctggatcttgccgctgggcagtacactgatggaatgtagcgaattcggttgtccactcggaccttattatagtcggctaagagagagtcgagaaggataggagactgataatgatataacaaataagctagggaggtaagccctgctgcctgccgcctccctgcctgtctggctggtagtattatactttgtacctttgatataacaaacgtttcatggttagattatactctctcacatccacgtctccctttgcatcatcatactatacagggagtggattctaatccctcgaggggatatcccccgtatacctttttctttcaaatttgatgcaaatagttgcaaaaaattctaaaaaaaaaatgacaatatagagtataatgatgcctacaagtccaccaaaattcatgttcaaattcgatctacacatcgagaaacaaaaaagacaaatttagatataaacagtacgctactattcataggctgaatttgtcttttttatatctcgacgtgtgagttgagtttggacttaagatttagttgagttgcatatatgtgttgtatggatgttgtcaaatttttccagaatttttcataaccgtttagatggtttttaagcaaacaagagaacatcccctcgagaaattagaatagtttcccggcagatgcgaaagcattgcatgtcacctgcagaagtttcataatataagataggggtagttgtttagttaaagctacatatgtacgtcggcaaagtaattaagtattgcgcacggtagttttgatcgatatatctgtgatggccaaccttttgatgaccgacgagacagcaaagctaccgatcggttaccgctaattgcgggacagcggatacatcaacttttaaccgaggagagcaaatgccaacttcggataaacgaggcagcaggtagaagcgaaagaaggaaaaggagaggctacttagctagctataagcagctcacgtgctccgccggtggcgcgaggcggtgttgcggggtgggggcctcgcgctttcctgccgtttccacccccgccctttgcgcgcgcatgcacgccgacggcggcgcacgcgacacctggccttctgcccttcccgagcagtttgctagctacgcttgcctcgccgccgccacgcgcgcgcgcgccaccggcaggcagtggcacggactcatgccgcgggtgcatttccagcgccgccgcacccagcgccagcggacgggggccgcctttacagcctccaaccgaaggcgcgcgcgcgtcgaatcgatcgatcgatctaccgtgcgcgacatgccacgcgctcgccgaaacggacgggagatcgatcgggatcccggcccgcgcgcgcgaccaccgggcgttgtgttgctgcgttcgtggaccggtgcacggggcacggccatgtcacactcacccgtaattgcctggatcgattggtcgcgcgtagtacgtgccgtggtgcacgtgccccgcggtgtgtggggatgcgtctacgatctacgtggatggaccccgtgtccccgtcggtacgcgaccgatcgatcgatcggtcgatgcgtggggcggtgcatgaacccgacgacgcggctagctcgaaagcgaaacacgtacggcgaattggcgagactgtcaaatcatctgtgtggcaaatctgagccgggaagtgagagtgaccggcgttgcaggttagggttctcgtgaaccgactcggcgtgagcatccgacaattaggatttgaaattgattaggagatagaagaagagctttagcttaagctctcaaagtcgttgcgcccaaaaaacgacaaggagcatgtgtcccgcataacccacgaagcttcgtggccgtttcgctccgagacataagaaaacgtccaagggctaatggcgagtagttaccttgtgcatgccggccggattagtagttctttagattagatcgatcccgatcgaaatgatttgatcccatcattgacagcgcaggcaggcagtgcgtgatcggtggacgtgcctctcctgtcctctcctctgttctgctctgatcagaacattccctctgcagaactgcaaagctgaggaatccgtttagggatcagtaaacaactccggcccgcgattaaattaactcccgattaagatatcctcccgcagtgctcgatcgtcactcagatctgagagcatcgatcacgtggccaacgcatcgatccaacgccatagccaccgccaagttattaccatgctgctacagtgccagtacagtacgtcgcacctgctctgttcgctgcatcatgtctctgcagtaacaaaattacaaagcggagtaacaggtatcagcagtagctggcttagctaaggccgagagcccgagatggaggagcacgttgaggatttgggcagcgtttgccttttcggttggattatgaaacatggatctgttttttaggggagaagcatgtgagtttggggctttcggggtgagttgtcgccttcatggccaagggtgccggcacgtgaggcaccgggaattgaaaggccttggccgcccctatcatttttcatagatttacacttggcctctcatgcagggtagttcagatagaccaaccagacaatcaagctgctgaagcagttattgtattagggtaaaaaggattcaataaacaaaactgttagtacgattctagcagaactttatcttgtgagcactggagaagtgtttggcagaagccgaagccatctgccgcggcgtcgcgccgtggtcgccggcggcggccggtccgtcgtcgtcgccgtcgtcaccctcggcgcgggaacccttgcagaaacgcgccaacaaggacgccaacgccgccagccaggagatgtcgggtgatccgcgttccatcacctcctacgattcagatataaatttagctgaatttgatggtttttatctgtggctgtgcaaggctggagggtagtaactagtctgtgaactgaccagcagattgattctggatgcttgattacaatcgctagttacccggcttacaagcatatgctcctttttttatagctgaacaatggagcacctgtgctgaattttatgctgctctgcttgttcgtcaaaattcgatcgcgacgtactaccagtagtattacatttccaattggttagcttggtgactattcttccttgacaagcacaaaagtatactccgatggtgcagtgcataactgcataccgcaatgcagcttccgatgtaacatctctctgagtcatcaaggtaaggctccgtttagttttaaaaagtttttcccaaaaacatcacatcgaatatttggatacatacatggatcattaaatgtagattaaaagaaaaactaattgcacggttagggagtaaatcgtgagacgaatcttttgagcctaattagtccatgattagctataagtgctacagtaacccacatgtgctaatagcggattaattaggctcaaaagattcgtctcgcggtttccaagcgagttatgaaattagttttttcattcgtgtccaaaaaccccttccgacatccggtcaaacgtccaatgtgacactcaaaaaatttcatttcgcgaactaaacaggccctaaagtcttgcaacacacatgtgacgtgactgagtggactggaataacggacagtgacccgacgtttttggagatccttggagaacaaggtgttgaaagtcatcaaaatttaggttgtgtttttttttgagaggttgaaaacttcttccctacacaagtaaaactgatcgatggattaacacatgattaatcaagtattatttattaaaagccttaaaaatggattaatatgacttttaaaataactttcttatagaaacttctttttaaaaaaattataatgtgcgtataaaaaacaagggagatgagtttgcgaactgaagacaattttattggagttggcgaagttcacccctcacctcatcggcacaatacaatgcgttaacaaatactacctccattgaaaaaaaaactcaatctagtgtgtgtgtatatatgtgtgtgtgtatatatatgagttaggggcaactttctaaaggtctagtgaatacctctacgtgacggctgcattcaatatctgagacgttcataaagcaatctgtcgaaacatgaattcggcaataataaaacggggtagcgcacgagacctaaaagtggatggatgtggagacaaaggatttagacaggttcaggccctctcaatgagaggtaataccctactcctgtttggggatttgaatccgccgagtgtgtattgatctgacgatcaggttgtctcatgccccctagagggcctcctgcccaccttatatagggtggggggcaggattacaagatagaaaccttaaccaatacggtatcggtttcctaaatctactttacaatattatcaaaccaggactttaggctgttccgtaatatataaggaaacgtaatgtcacgccctgaagttttcccccctttgcttgctttaaaaaaattggctaaataaatcgtccgaagaaattatcttaattaacctagagctaattccctaattaataaatgcaaataataatcggaatcggcatgtggaatttttcttggattctacatgtcacaatatattaacaggatttttagtggaattttcagagccttggaaataattttaaccaattaaaaatcaccaaagtgcaatttttaatcccaggaaaaatcctttcttctttttccttttcttttccttcttttttttctctattgggccgtcggcccactccctcccgcgctcggcctcttttcctttgggccggcccgttcccctttcccctccccgaagtcctccctccctccctctctccttcgggcgccgacaggtggggcccacctgtcggtcgtcttcctcctctagccggttggagccgagccccaaccgccggcgccccacctccccacgccgcccgccttctccgtccctctccgcgcccgcacctcgcgcccacgtcgccgctctcccccccccacatctcccgcgcgcgcgcgcccgcaagtggtgggggatttgaatccccctctctctctctctcttcctccccattcccccacatcgccggccaaatcggccacctccccggccacgtccgccccctcccgcacctataaatcgctccccgcgtcttcctctctcgtttttcgcactcgccgcgctctcccgtgccgtctaccgccctcgcgccgtcgcacccgagctccgccgcttgccgccgccttcggccgcgagccaccgccgctagagtcgccgccgcgccaaaccgccgccgccgttagcttcgccgctgcaagagctttcccggccgccgcctcgcgtcgccggaatcccaccggagcacctctcccctcgcgagccggtgagttttccctcccctccatctccggccggcaattcaagccgccgtggtcgtcgtctcctctcctaacgcctctccatcttctcctagggtgtcgccgccgcccgtccgtgcctccgcatcaccggtcgtcgccgccgctttcttccttcgcgccggccgccgtgctcgaaggtgaggaatcccctctcctccttcctttcctctctctcccatgagcgccgccgccctccgcgcgtgcgccgtcgtcttcggctgccgccgccgccttcgcgccggccgccgccgtctccccgcgccgccggtcaccgccggtggtcgtgcgccgtcgtcgcctcgccatggccggccggcttgagccgtgccgagcatgccgccgcccactccctcccccttgagccactgccagtggggcccgcttgccagccacgcccctctcccgccctgtgccgctgcccggtggggcccaccagccggtggaccacccctccccctccccttgtgccgctgccagtggggcccgcttgccagccgccccctttccctctcttagtgccgctgaccagtggggcccgcatgtcggcgccaccccctcccctcgctgacgtcagccctgggctttattgcgcaataaattgattaaggacttttctttattagtaaaaacacagtttatcttctaaaattcataagtaattcatccgagctccgtttaagtccattcaagtctcagtaaatcaagaaaaatgcaaagaatccattaaaaatggttttgttccctgtttcagtagtcttatagcctgttttgcttgtgtgctttgtttgtcgcgtagatttcggccgtttcgtcgatccacggtttctcgaagacgttgctgaggtctcgtcagtgcgagagcaaggcaagtcatgcaatacgtttgatcatattgtacccaatttacaaatatcccgcatttctattaaatgttgcattcttttacaatatcatgtgggatgggtcctactactcagccatatattgtttaccttatgccattgataacttgggtatcaaaatgactagatgttggtttaggaaatgcttagccatgcttagttcaactagcacacacatggggatcacattattacatagactttgactatgagcatagctttggattggtgccaccgcaatggtgttagttaattaaaatacactgaatggtgggctgtgggtgcatggttttgctggtcgcacccatggcagttaaggaccggttcacgggaaaccctgggagacttaccgtgcttaccacaagcgggagtgggtaactgcttgatctgaagtatagctcgaccctttcctaggcaccggtggcgagggtgggcgtgatggagttgggtcggccggggtgtccggttgtccagctgccggattcaccgcggcgcaagaggggaccgcccactgccttttgaggggtgggggtgaaaccttagcgtggtgtggatggttaggggagggttatgtggagggtcttgtcacgatttccccctttgcagtatcatggtgatacttcggggcatggcgacatgtgtggaatcgtgtcttgtgggtacagttgtacacctctggccagagtaaaactattcgaatagccgtgcccgcggttatgggcgatcaaccagattcaccgtgattagtctcacccctagtttagcttaatgaattggtgtagttcaggtggttggttgggcctgttgcaacgtggtgtagcgttggacagtgattggttaatattgattaattactacagctgttttactgctttcaactactgcttttaaatgctagccttatgcaaaagaacttctagcctcctttggttatatcctgcatcatacctcctcttccggtatgacttgctgagtacagtgggtagtactcagtcttgctctcttttcccccacaccagagctgaagatcttcctagttggagctgttttgtcaaagttggtttcgtcgctgccgtcaaggattgcctgtggagtggagtcgcccgctgctgaagtcaagcttcccggtttagctcgcttttattcttttccgctgcatttgtaatcttttctatttttgtaagacgtggatctgtatgtcaacaattgtcgtttgtgtaccctggctggtcctggacagggatttaatgcacattcagcttagaaattctggtttgagaatttctgggcgtgacaagttggtatcagagccgaccttgaccgtaggacaagccaactggaaaccctaagagccctctgaacccctttttcatctgcatatgcctttttgcacctggaattattttgggaaaatttagagttttgcctctttggcttgtgggaaaaatcttggtcgttcattcggatcggatttttaaaaattagctcagtgtagggttttagaaaaaaaacaaaatctagttggagtttattcgacagtcagtcgggaatctattgggggttatgcattaggtcgtgtctatgttcgatggggcaatgttgcgcatcattttccatgcaactagtctatgtattaatttattgtttagttgcattagtgtctttatttgagttcatgaaaaatgttctatgcataaaaaccatcatgctcggttatttatctgagtcttcttttgctttgtttaatttggatttgagcatgagttggttcctatcccttgtctactttagatgtcagttctatccctcgtttgcaagcgccgcctcgagcttcagagtcgccgcccttagctttatcgtcttcttagtctggttgcttgctagttttcgtgtttaggtttgttgcttgtgggctagtcggcggccgatatcatgtgtcagtggtatgactgcctcaattaggagttgcgtgcctcttttttcagtgttttaatcaagattaagataattgcacttaaattcataagcaagattagtttctgagccccctgtttttcttccttttctcatatttctacctatccccttcagatggagataaggaatggttcacgcgactcgaacaacgccagtggcagcgaagagccgatcaatggagcacgtgccaacggtgcatctgacaacagtccgtccccaccgcccgagaacccaacaattgctcaggtgttggacaatcagactcagatgatgacaatgatgatgcaacagatgcagcaacagtaccatcaggtgttgcagcaggtgcagcagcaagcacagctgcagcagcagaacctgcagtttggtcctccacctcctcagtccaaactgttagaatttcttcgtgtcaagccgcccaccttctcaagcaccaccaacccaatcgaggcccacgactggcttcatgccattgagaagaagctgaatcttttgcaatgcaacgagcaggagaaggttacttttgctacacaccagctacaaggtcccgcttctatttggtgggacaactacatggtgacccgtccagctggggcagaggttacttggacagagtttcgtcatagtttcaataaagcacaggttcccgagggaattgtggcacaaaagaagagagagttccgttccctgcaacaaggaaccagaacagttatagagtatttgcatgagttcaaccgcctcgcgcgctacgcccctgaggacgtgcgtaccgatgccgagaggcaggagaagtttttgtctggtcttgatgatgaattgactaaccagttgatctctagagattatgaggactttgagaagctggtggataaggctatccgtcaggaggagcactgtaacaaaataaaccgtaagaggaaggcagctcagttcaggactccccaggggaagagtcagaagcctcgtttcacgatgggacatcacggtggaccttccaccatgattatccggcagcaccgtccctaccacccgggtaacttcaacaagaaccaccatagtgacagtcacaacaatagtgagcagcacagcctcaaccctactccgagttcactaaagattccagctcaatcagttcagccagctctgccagaacagcccaagaggttgggagaaaaacccgaactctgcttcaattgtaacaaacccggacacacggttggaaagtgcccgaagccaagacgtgccggacccaagttcgttcaggcccgtgttaatcatgcatctgcagaggaggcgcagtcagcaccagaggttatattgggcacattccccgtcaactcgacaccggcagtaatattgtttgattctggtgcaacccattccttcatctccaagcgttttgctggtgcacatgggttatctttagtgaagcttaagataccaatgcgagttcatactcctggaggtggcatgaccacaactcactactgtccatctgtgacagttgaaattcaagggttgatttttccagccaacctcattcttctcgaatccaaggacctagatgtcatacttggaatggattggttggcaaggcacagaggagtgattgattgcgccagccgcaccatcaagttgaccaatgcaaaaggagaggtggtaatcttccagtctccagtgccgcagaagccagggattagtttaaaccaggctgctggtgaagaacaagaggtagcagtggagaaaaccactaagaagctggaggatattcccatagtcagagagtatccagaggtttttccggatgatctgacaacaatgccaccaaaaagggatatcgagttccggattgacttggtacctggaactgcaccgatccacaagaggccttacagaatgggagccaacgagttggcgaaagtcaagaagcaagttgatgaacagttacagaagggatacatccgcccgagcacgtcgccttggggtgctccggttatctttgtggaaaagaaagacaaaaccaagaggatgtgcgtggactaccgcgcactcaatgaggtcactattaagaacaagtatccgttgccaagaattgatgatctgtttgatcagttgaaaggagctacggtgttctctaagatagacctgcgatcaggttatcaccagttgaggatccgcgaagaggatattccaaagacagcattcatcactcggtacgggttgttcgaatgcacagttatgtctttcggactcactaacgcacctgccttcttcatgaatttgatgaacaaggtgtttatggaatttctagacaagtttgtcgtggttttcatcgatgacatacttatctactccaagtccgaggaagaacatgagcagcatcttcggctggtacttgaaaagttaaaagagcaccagctatatgccaagttcagcaagtgcgacttctggcttaaggaagttcagtttcttggtcacatcgtgaatgctcaaggagtagctgtggatccagcaaatgtggagtcagttaccaaatggaccccaccaaggacagtcactcaggttcggagtttcttaggacttgcgggttattaccgccggttcattgagaacttctctaaaattgctaagccaatgacacagctattgaagaaggaagaaaagtttatctggtctgctgaatgcaataggagttttgaagaactcaaacgacggttggtgtctgcaccagtcttaatcctgcctgatcagacgaaagatttccaggtctattgtgatgcatctcgccaggggctaggatgtgtgttgatgcaggatggcaaagtggtttcttatgcttcacggcagttgcgtcctcatgaaggcaactacccgacgcacgatctggaattggccgcagtcgttcatgctttaaagatttggcggcactatctcatcagtaaccgttgtgaggtatatacagatcacaaaagtctaaagtacatcttcacccaacctgatctgaatctccgacagcgaagatggttggagctaattaaagattatgatatgggaatacactatcatcccggcaaggctaatgtggttgcggatgccttgagcaggaagagctactgcaatgttgcatgggtaaagcaactatgttgtgaggttcaacgcgatttggaacatctgaaccttggtatagttgagcacggattcgtggctgccctagaggcacagcccacacttgtggagcaggttcgcatagctcaagcaagtgatcctgaaatagcagagctcaaaaagaacatgagagttggaaaagcccgaggttttgttgaggatgaacaaggaacaatctggatgggagaaagattgtgtgtacccgaaaacaaggaattaaaagacctgatactaaccgaggctcatcaaactcagtattccattcatcccggtagtactaagatgtaccaagacctcaaagagaagttctggtgggtcagcatgagaagggaaatagctgagttcgtagcactctgtgacgtctgtcaacgagtaaaggcagaacaccaaaggccagcaggtttgctacagccacttcagattccagaatggaagtgggaagaaatcggaatggatttcatcaccggtttgcccaggacgtcatcggggcatgattctatttgggtagtcgttgaccgactcaccaaagtggctcacttcattccggtgcacactacctactcagggaagaaattagcagaactctatctggcaagaattatgtgtttacatggtgtacctaagaagatcgtgtctgatcgaggaagccaattcacttcaaagttctggcagaaattacaagaagaattgggaacccggttgaatttcagcaccgcttaccatccacaaacagatggccagaccgagcgagtcaatcaaatactagaggatatgttgagagcctgtgcgcttgactttggtggagcatgggacaaaagcttgccgtatgctgagttctcttacaacaacagttaccaagctagtctgcagatggcaccatttgaagcactgtatggacgaaggtgtcgtactccgctcttctgggatcagacaggggaacgccaattgtttggtacagaagttttaaatgaggcagaagaaaaagtcagagctgtcagggaaagattgagaatcgcgcaatctcggcagaaaagctatgcagacaaccgccgaagggagctcgttttccaagtaggggattatgtgtatctccgtgtcactccgctcaggggagtacatcgcttccaaaccaaaggaaagttggcaccacgctttgtgggaccatatcgaattttggaacgtagaggtgaagttgcttaccagctcgagcttccctccaacatgcttggcatccataatgtgttccacgtctcccagttgaagaaatgtttgagagttcctgaggaacaggcaagtccggatcaaatcgaaatccaggaagacttgacgtatgtggagaagccaactcgtatcctcgaaaccagcgagagaaagaccagaaacaaagtaataagattctgcaaggttcagtggagccaccactcagaggaagaggccacttgggaaagagaagacgagttgaaggccacccacccgcacctcttcgccagctcttccgaatctcggggtcgagattccgtttaaggggggtaggtttgtcacgccctgaagttttcccccctttgcttgctttaaaaaaattggctaaataaatcgtccgaagaaattatcttaattaacctagagctaattccctaattaataaatgcaaataataatcggaatcggcatgtggaatttttcttggattctacatgtcacaatatattaacaggatttttagtggaattttcagagccttgaaaataattttaaccaattaaaaatcaccaaagtgcaatttttaatcccaggaaaaatcctttcttctttttccttttcttttccttcttttttttctctattgggccgtcggcccactccctcccgcgctcggcctcttttcctttgggccggcccgttcccctttcccctccccgaagtcctccctccctccctctctccttcgggcgccgacaggtggggcccacctgtcggtcgtcttcctcctctagccggttggagccgagccccaaccgccggcgccccacctccccacgccgcccgccttctccgtccctctccgcgcccgcacctcgcgcccacgtcgccgctctccccccccccacatctcccgcgcgcgcgcgcccgcaagtggtgggggatttgaatccccctctctctctctctcttcctccccactcccccacatcgccggccaaatcggccacctccccggccacgtccgccccctcccgcacctataaatcgctccccgcgtcttcctctctcgtttttcgcactcgccgcgctctcccgtgccgtctaccgccctcgcgccgtcgcacccgagctccgccgcttgccgccgccttcggccgcgagccaccgccgctagagtcgccgccgcgccaaaccgccgccgccgttagcttcgccgctgcaagagctttcccggccgccgcctcgcgtcgccggaatcccaccggagcacctctcccctcgcgagccggtgagttttccctcccctccatctccggccggcaattcaagccgccgtggtcgtcgtctcctctcctaacgcctctccatcttctcctagggtgtcgccgccgcccgtccgtgcctccgcatcaccggtcgtcgccgccgctttcttccttcgcgccggccgccgtgctcgaaggtgaggaatcccctctcctccttcctttcctctctctcccatgagcgccgccgccctccgcgcgtgcgccgtcgtcttcggctgccgccgccgccttcgcgccggccgccgccgtctccccgcgccgccggtcaccgccggtggtcgtgcgccgtcgtcgcctcgccatggccggccggcttgagccgtgccgagcatgccgccgcccactccctcccccttgagccactgccagtggggcccgcttgctagccacgcccctctcccgccctgtgccgctgcccggtggggcccaccagccggtggaccacccctccccctccccttgtgccgctgccagtggggcccgcttgccagccgccccctttccctctcttagtgccgctgaccagtggggcccgcatgtcggcgccaccccctcccctcgctgacgtcagccctgggctttattgcgcaataaattgattaaggacttttctttattagtaaaaacacagtttatcttctaaaattcataagtaattcatccgagctccgtttaagtccattcaagtctcagtaaatcaagaaaaatgcaaagaatccattaaaaatggttttgttccctgtttcagtagtcttatagcctgttttgcttgtgtgctttgtttgtcgcgtagatttcggccgtttcgtcgatccacggtttctcgaagacgttgctgaggtctcgtcagtgcgagagcaaggcaagtcatgcaatacgtttgatcatattgtacccaatttacaaatatcccgcatttctattaaatgttgcattcttttacaatatcatgtgggatgggtcctactactcagccatatattgtttaccttatgccattgataacttgggtatcaaaatgactagatgttggtttaggaaatgcttagccatgcttagttcaactagcacacacatggggatcacattattacatagactttgactatgagcatagctttggattggtgccaccgcaatggtgttagttaattaaaatacactgaatggtgggctgtgggtgcatggttttgctggtcgcacccatggcagttaaggaccggttcacgggaaaccctgggagacttaccgtgcttaccacaagcgggagtgggtaactgcttgatctgaagtatagctcgaccctttcctaggcaccggtggcgagggtgggcgtgatggagttgggtcggccggggtgtccggttgtccagctgccggattcaccgcggcgcaagaggggaccgcccactgccttttgaggggtgggggtgaaaccttagcgtggtgtggatggttaggggagggttatgtggagggtcttgtcacgatttccccctttgcagtatcatggtgatacttcggggcatggcgacatgtgtggaatcgtgtcttgtgggtacagttgtacacctctggccagagtaaaactattcgaatagccgtgcccgcggttatgggcgatcaaccagattcaccgtgattagtctcacccctagtttagcttaatgaattggtgtagttcaggtggttggttgggcctgttgcaacgtggtgtagcgttggacagtgattggttaatattgattaattactacagctgttttactgctttcaactactgcttttaaatgctagccttatgcaaaagaacttctagcctcctttggttatatcctgcatcatacctcctcttccggtatgacttgctgagtacagtgggtagtactcagtcttgctctcttttcccccacaccagagctgaagatcttcctagttggagctgttttgtcaaagttggtttcgtcgctgccgtcaaggattgcctgtggagtggagtcgcccgctgctgaagtcaagcttcccggtttagctcgcttttattcttttccgctgcatttgtaatcttttctatttttgtaagacgtggatctgtatgtcaacaattgtcgtttgtgtaccctggctggtcctggacagggatttaatgcacattcagcttagaaattctggtttgagaatttctgggcgtgacacgtaatacccaagtcatgatctgttacatattccatacatataagttatcccctataactagtcggataaccatgccgtgtgggtatggggtacccataatctccacagtagcccctgagaccttcacagtcgaaaagataatcttctctcgaaccagattactccaaagccgagtacttcaatcatctttgccatggtctcccgagtacttttaccaaatctgaagactgtggagggctgaaaaataaagtcaggcgcatcgactagatgcacctaataggtgtagccctcgactatgcggttaagtgaacaaaccaagcatatagtcaagaaataaataatccaaccaaccgagtggcttcgataattatagttaaccaagcgacttgatattaatatgtagcatatgcggtgtaaatccctgaataacatgatccgagtgatataccgactgctttgtaaaatatgatgagtgtaacctaaagttggctacattattgaaaattcacatagcaaaatagctataaagaagcttgtatgttgtgaataaagaaatttccaaagtattgggcatacgccatgcgcacactgctttaacagatgtgcttaagtccctagaagacacatggttccaccacacctagaaatatatggcatatgtggtataaaatccgagtaaataaactcataaaggatttaccaaccgcctgaaaaatgaccacaatatataatcagcctaagccataatattggtcaataaaaatgcacacttacgtggcaaaaagcaacgatattgtatccaatcaattgctttaaaacccaaacagcaccatgactatattaaaaagtcagcggggcagctatataaagctttactgtttgacaccttttaagatgcattgtaccaactcctaaaaagttgagtaactgcggtataaaaggattttaaggtattgggcacttgatcacgcgcactttggcctaagcaaaaagtgcctaagtccctaaaagaacgtgacaggccacacctgaaaatatgggctgcagacatattaggcctaggccaaaaaatatgccttcgacaccctttaaaggatgacgcatgtaacatgctcccgagtaataaatcttccgggtaatatagaccaagtgtagctcatatgaatagcttctgatctgaatgattatcccttatgggatactccaaaataaatataataattgaatcccgactggcgcgagtattcgggtgatagcccttacggggaataataattggtccagtctttgagcatagaaaatagactcatgactatgaatccatgtggaatgtatccggaacaagtccaaattggagatataatcctcacgcttgagttgatgagcccctgagcatatagcttgtccttctgtcatagtcaaaattgtctatttgcaatagctgacgcagtcggcatggagatgaaatgaccaacatgaagacgaaattgctcatcagaagtaacggaagatgtcagtggtagtaaagatgccaccaatcaaatgtaatgaagttgcataaccatggaggcgaagaaaccagtcggcaacagtcaggtcagctagcagtgaagatgtaggcgcccaacaacaacgaaagaacagtcggtggtgacaaaagcaaaccgacgatgaagatgtagacgcgcatcaacggtgatggcgaaatccaccaatcatgaagatgaagaaaataatcggcggcgacaaacgcatccgacggtaatgatgattagcggcaacagagatagccgactatgatgacgaagtttcccatcaacggcagcagagtaggctatgttgatgaggcttgacaagatgttgatgaagatgacgatgtcggtgatccagtcaatagcgatgtagcagccgatgataacgatgagatcctctatcggcagttgcgtagtaggccaaccgtgaagacaaataattggaggagagttgatgttgttgcccaactcgtctaaaccgaaatatttgaagttgttgaagtagaatgtctgttccgaagcaaagatgaagataatgactcctagagttgactcattggctgattaattgatttcttcagcttgacataaaatttgtcaaattttgagccttatatttgtgtagcccccgactctttggttagttgagaaacaactgaacatagagtcgagaattatagcttcttgtcgtcgagtagtcattgcttgattgaagatatgtgttgaaggtgtccaagtagaaatccggtagtgaagacgcgtagttgtgaagataaaagcaccaatcagcggcagcataatcagtcggcgacggaagatgatgatgtccatcagtagtggtagctgtataaaccagacgtagaggtaagggcactagtcagcagcagacgagacgaccgacgatgaagatgtagatgcccaacaacagcggcataataggccaatcaacactggcagaatcatgcagccatggaagtgaagaaaccagtcggcagccatggcaaacgtaggcagcttgtgttgaagatactgatgcctattagtagtgacagcgatgtagccagccgtgaagaagatagcatcagttggcgttataacaggccagccgtgctagcggtgacatcagtcagtggcggatgcggcggccggtcggtgaagacgtagacgcccaacaacggcggcataacaggccagccgtgcaggcggaaacaccagtcggcggcggcgaaggcaagccggtcggtgaagacgtagacgcccaacaacggcggcataataggccagccgtgcaggcggaaacaccagtcggcggcggtcgaggcggccggtcggtgaagacgtagacgcccaacaacggcggcataaaggccagccgtgcaggcggaaacaccagtcggcagcggcgaaggcaagccggtcggtgaagacgtagacgcccaacaacggcggcataataggccagccgtgcaggcggaaacaccagtcggcggcggcgaaggcaagccggtcggtgaagacgtagacgcccaacaacggcggcataaaggccagccgtgcaggcggaagcaccagtcggcggcggacgaggcggccggtcggtgaagacgtagacgcccaacaacggcggcataaaggtcagccgtgcaggcggaaacaccagtcggcagcggcgaaggcaagccggtcgatgaagacgtagacgcccaacaacggcggcataaaggccagccgtgcaggcggaagcaccagtcggcggcggacgaggcggccggtcggtgaagacgtagacgcccaacaacggcggcataaaggccagccatgcaggcggaagcaccagtcggcggcggacgaggcggccggtcggtgaagacgtagacgcccaacaacggcggcataaaggccagccgtgcaggcggaaacaccagtcggcagcggcgaaggcaagccggtcggtgaagacgtagacgcccaacaacggcggcataaaggccagccgtgcaggcggaagcaccagtcggcggcggacgaggcggccggtcggtgaagacgtagacgcccaacaacggcggcataaaggctagccgtgcaggcggaaacaccagtcggcggcggtcgaggcggccggtcggtgaagacgtagacgcccaacaacggcggcataaaggccagccgtgcaggcggaaacaccagtcggcagcggcgaaggcaagccggtcggtgaagacgtagacgcccaacaacggcggcataaaggccagccgtgcaggcggaagcaccagtcggcggcagacgaggcggccggtcggtgaagacgtagacgcccaacaacggcggcataaaggccagccgtgcaggcggaaacaccagtcggcggcggtcgaggcggccggtcggtgaagacgtagacgcccaacaacggcggcataaaggccagccgtgtaggcggaaacaccagtcggctgcggcgaaggcaagccggtcggtgaagacgtagacgcccaacaacggcggcataaaggccagccgtgcaggcggaaacacaagtcggcggcggcgaaggcaagccggtcggtgaagacgtagacgcccaacaacggcggcataaaggccagccgtgcaggcggaaacacaagtcggcggcggcgaaggcaagccggtcggtgaagacgtagacgcccaacaacggcggcataataggccagccctgcaggcggaaacaccagtcggcggcggtgaaggcaagccggtcgatgaagacgtagacgcccaacaacggcggcataaaggccagccgtgcaggcggaaacaccagtcggcggcggcgaaggcaagccggtcggtgaagacgtagacgcccaacaacggcggcataaaaggccagccgtgcaggcggaaacaccagtcggcggcggcgaaggcaagccggtcggtgaagacgtagacgcccaacaacggcggcataataggccaaccgtgcaggcgaaaacaccagtcggcggcggacgaggcggccggtggtgatgttttgactgatccattcctagagcgtaagagataagcttaaagccatgaatcccttttatgcatatctggatctggatcctgcagaacaaacatataggatgagtagtacctgatgtaaatataatactcgaaaaaaaaattcaagcattttaaaatatttataaatatgtatttctcctcttgtcaattttgatttccccgagcagatgactctgtacgtttaaacactctgtccgactagtcatagcccccaagcatcgggagtcggcctaggcatttcccaaacatgcatatgagtgacatgagttcgtcattaatggaacaaagtttcacggatcagaatttactactcaggtacttttgcaattattaagagcagaaaataaattatattatctctatgcttttgatttcttccgagtaatacttagcaccttgcgttactcggtccatccaacgagcccccgggtgctaggaatcggcccaaaggcaaccatccattggcaaaccaaacggaaagcataggaagatagaactccataactcgataggtacttttgtactcagattatgtcgcaagcaatcaagataaatattataaaaaatatgatataacatctatagcccccgactcactactcaatggaagaccaattggtgtagtgaggcagaggaaaaggaaaaatatcatataaagaataaaataaatgatgacttagctttgtaatattccccttggtgatggcagaagtgaccaatgtgggaacaaagtcgtccatcaataacaatgaagacaccagtcggcggcgacggaggcaggccggcggtgaagtcgtagacgcccaacagcggcggcataatagaccagccgtgtaggcggaggcaccactcggcggcgacggaggcaggccggcggtgaagtcgtagacgcccaacagcggcggcataataggccagccgtgtaggcggaggcaccaatcggcggcgacggaggcaggccggcggtgaagtcgtagacgcccaacagcggcggcataataggccagccgtgtaggcggaggcaccaatcggcggcgacggaggtaggccggcggtgaagtcgtagacgcccaacagcggcggcataataggccagccgtgtaggcggaggcaccactcggcggcgacggaggcaggccggcggtgaagtcgtagacgcccaacagcggcggcataataggccagccgtgtaggcggaggcaacaatcggcggcgacggaggcaggccggcggtgaagtcgtagacgcccaacagcggcggcataataggccagccgtgtaggcggaggcaccactcggcggcgacggaggcaagccggcggtgaagtcgtagacgcccaacagcggcggcataataggccagccgtgtaggcggaggcaccactcggcggcgacggaggcaagccggcggtgaagtcgtagacgcccaacagcggcggcataataggccagccgtgtaggcggaggcaccactcggcggcgacggaggcaagccggcggtgaagtcgtagacgcccaacagcggcggcataataggccagctgtgtaggcggaggcaccactcggcggcgacggaggcaggccggcggtgtagatgacgatgcccatcaacggtggtgtgaccaaccgaccgtataggcggggacaccagtcggcggcgacggaggcaggccggcggtgtagatgacgatgcccatcaacggtggtatgaccaaccgaccgtataggcgaggacaccagtcggcggcgacggaggcaggccggtggtgaagtcgtagacgcccaatagcggcggcataataggccagccgtgcaggcggaaacaccagtcggcggcggcgaaggccagccggttggtgaagacatggacgcccatgaacggtggtgtgaccgaccaaccgtataggcgatgacaccagtcggcggcgacggaggcaggccggcggtgaagtcgttgttgctatcagcaatggcggtggcgaggacaagccggcgaagtggactcgcggccgatcgaccggaaagctgagacgcctcgagtccatgaccagcatcaatcgcctcaatagtgccgcgtaattatatgcgaacaacaacaaaaaatagcaagagattaatctgagattaaaaatcaatatgataaataatgataaaaatcagattgagtttccccctgactgatttggatcaagtcagagaagaggagcttgaagaagtggtcgacggaaaggaagtgaaaactcccaaagcgaaagcgaagtcggcgactcatgaaattgattccatcgcgctcgttgataggaaactcgacgcaacccctacctggcgcgccaactgtcgaaacatgatttcggcaataataaaagggggtagcgcacgagacctaaaagtggatggatgcggagacaaaggatttagacaggttcaggccctctcaatgagaggtaataccttactcctgtttggggatttgaatccgccgggtgtaatatagatctgacgatctagttgtgtcatgccccctagagggcctcctgcccaccttatatagggtggggggcaggattacaagatagaaaccttaaccaatacggtatcggtttcctaaatctactttacaatattatcaaaccaggactttaggctgttccgtaatatataaggaaacgtaatacccaagtcatgatctgttacatattccatacatataagttatcccctataactaatcggataaccatgccgtgtgggtatggggtacccataatctccacacaatcggacggatggaaataaccgagtactgtagtttgctgtgacaccaaaatgcagataaaaaaaagggatatttgcaaatttgccaccggtttttttaattttgcaaggatgccactcgaatgatagttctagtggcatttttataattttctagtggcagtcttacaataatgattcaaaacggtggtaaatttacaattgccccataaaaaatcgtccaacgtgcagaaaaaagaatttatcgtcaggaaagcaccatctgaatatctgattatgcagactaccttacgtaaaagaaatgccaactacaccaatcgaatcccagtgactttaattatcaccaaaatcaacatgaactgatcagttcttgtccagtaccgtttggacatgtatagaacaaccaatttgtcagtaacaagaaaaggtctacaaattcacggtttagaatttttttttcaccgctgcattcttatctacacctatctctgcagaacctgcaggcaatttgtacatatgtacttattataaatggaactcaaaatggttgagttcaacgtgcaaacaacgaatttttcatatcgcactaactaatgcacagatcaccacggagatgtgcgatcgccaactaaaacgtccccaagcaagcgtcgctgtacacggccactccatttgccaccaaagcaagaacaatcatgaacaccgcgagatacttgtcgcccttcgtcgctatgccgtggcgatccctgcaaaatcaaagcaaccaagttcacagagatctaatgagcgtgacataaaaaaaaggggcaattatgtttctgcccttgctttacgatttaattgtgattttacccttgttttttagggtttgtgattttgcccctgcttttttgaaatgaagcagtcgtctgcccctggttttgacagaagtttggtgggcccgaaattttagaattaaatgatgaaacaaaatgttattatcatttgtgaatgaccattctacccttcaatgaaagaggcaaatccccaatccctgtcccgaactcccgatttccactccaaacgctatagctgggttgcaagcggcggcggcggcggcagcgcggggcagctgccgcgggccagcgcgcggcggagtcggtggagtcgggcgcgggcagggaggcgcggcggcggaccggcgggcgcgcggggcagggaggcgtggcgccccccgcggccagcgcgcagggatgcgcgacgcggctgccacgcgcagggaggcgcggcggccagcgcacggcggagaggagcggcggctccgtcggccagcgagccagcaagcagcgagcaggaagcttggcggcgggatggcgctgttaaaggaagcttgacgacgtcgcgaccgcgactccctccctcatcgacaacaccgccggggagcacgtcgtccagccgacggagccgcgggcgcgggccttctcctgtggcttccggcgttcgtcgaccggagctccacggcttccaccctccgaggcaacgtcaggtggctcagagatgtcaccgtcggcgccatacaggcagcggtggaggcctcctcctcctccaagccggagcccgccaccttagttcatccacatccgcggacccagaaccgaacgcaggttggggttcttgatttttttttttcttttctagataatgaagttggggttcttgatttgctacgccatgcttgtgattcaatcttgtttctgtagcttacccaatataaaggaccttgatcttgtgcaatgttgcaatcatatgtaataagtatgtactactttataaactgtgttctgtcatcgtttatatgaaattggcacaaaaataacttgaaacatatccagtgtgtataccaaaacatgtccaggggtatgtttgtctattcaccacacatttaacaccgttaccactaattaacagagtaggggcaggcggctccttcatttcaaaaaagcaggggcaaaatcacaaaccttaaaaaacaagggtaaaatcacaattgaatcgtaaagcaagggcagaaacacaattgcccctaaaaaaaattaaccatctagtagactagtactaccctcgttccaaaataagtgcagccatgagtttccgcgtctaattttgatcgtccgttttatttgaaatttttttataattagtatttttgttgttatgagatgataaaacatgaacagtaatttactcgtgacttatgtttttaattttttttaaaaaaaattcaaataagacgaacagttaaaattgaacgcggaaaaccatggctgcacttattttttattttgggagagtatgagattgagctaagtaaagaaaaaaataatgttcagttggtcatcactcacctcagtgccattccagcagggaaaatgtaggcaatggcgacggcggcagtggcgccagtgaactggaacgcgtcccaaatgttggggacgaagttggcggcgaggaagatgaccgtgaggagcgccgccgtgatcgcgccgaacctccggttgtcggaagagaggggcctcgccgaggggaagaggaggccgtccatgttgaaccgcagcgcgtggaacacaatggggaagacgagcatgaggtggagcacgtagctgaccctgacggcgtcgtcgagcaccaagctgtaggggatgccgaggtcggagtcgaagtttgcgagcacgtcgtccagcgttgcctcgccgaagaggaggaagccgaagaagctggtggtggtgtacacggccaagcagagcagcagcgacgcccgcactattggcctgatctgggagtggtccttgagctcgttgtgaattgggtgcactgaatttagtgccaagttaatcacatttccacataaaaatgcaaacttatagctggtaattaaaatgtaccgttgtaatggcaaatgtaggcggtcacaagaactggagctgcagtgaaaagtctccaggtggagctccagtcatgaacatcagggaacagtttaggcatcggaatctgccctctcatcagcttgatggtggtgattccggcagtgatcaccacgaacacgacggccagagcaaccgataaggccgacgtgtatttcagtgaatctgaactcatctcagggaaaaagaacacaagccattagagtcagaacgaaatgttcagactgaaaaaaaaaactgtagctttgtgtggttgagccgggcaaccatgtacgcaccgactcgcttgaagcatgtcagtggagtgaacacaccgagcgtgacgatgacgaggatggagaagcggccgttccaccggtttggaccgaaccatccttctatcacgccgtgatggtgcacgccgccgctggatgacttcccagagagcacatcgccttgcgtaaaaatgagtagagagcccatcatttcacaaaatttcttcaaccgaacagtctaaattaaactatcgattgattaagctaagcaatgcatgctgagatgaaaccataccgatgatgatcatgtagacgaccatcacgccgacgttgttgacgacgacgcagagctggaggagccccctgccgaaagcaccgaaggcgtcgcccatggcctcgccgtacgaggtggcgcccacggcgcggctgaaccggacgaggagctcgatggaggcgtccgtgagcaccgcggcgagcatcaccaggatgaggcccggcacgaggccgagcaccttcatggtggccgggagcgccatgatgccggcgccgacgatggtggtggacaggttgaacaccgcgccggagaaggacgcgccgtcgaagtggtcgtgcgacgaggcggcgccgtcgtcaccgccgtccctctgcttcctcgggagaagtggctcgctgccctccgtcggcattggcatcaccatcctcgctgatccacgcgtggatttgcgcggacggaattccagtttttttaaatcgcgttttgatctcttactgagtagaagctgaaaattcttcacgcagacatggatcgaagagtccaaaatgcacaatcaagacaggcagatttgatgaggtgatgggttcccttccttcttcagttcttcccctttaacctcgcgaccggaaaacgccgaggcaggctatcgatggcgagaaaataaggggagggacaagcatggtggcgctttggccggacgagacgaggcatcttataattagacgactcctgatttagcaactaacaccactcgctaaaagcctaaatcagctgaagttcaagcgagccaccggccacaccgcccgcttttacatggcatgcctaaatcacctgaagttgtagcgccaccaagccacggcggaacccgtgccggctccggcgccgcgcacggacgtgtcggcaacggccaccgctgctggcgcgagcggaaggacgacgatggtaggagggttttgggttgtgaattggcccataaaaaagtgggcctgtagtgggccgtatggatagacgggaagaatttagctgtgaaaaagttcacttgagttccctgaactggaataccaatgtcacttgattatcaggttcctttcgttcttaaactgttaaacatttccatcgatctgcttctaaaattttagtataagtacaatgggactgatcaaataccaagtatcttttgaagttgcagtctagattcaactgtagatcaacagattgtattcaactgtagatcaaatcgtatgtatctagttaacttcttagcaaaaggtgatgtaattcaatgatcgaacccatttgaaaatccattttgccacaaacaataggactacacaccatcaggtgaattacctagcaaagagaaattagacctttttgataaactaaagaaatatgcaacctttgatgcatatggaactatggaagcaatagggaggaggatccacacaacacagatagttcatacgcgaatgcttcataagatactcaagtataggaatactacctttgtgaagggatgcataataagaaataaaatagagaatataaaaagctcctaaatataaaataggttaacaatcacatacctgtgcactattgcactgttcactcttcctttgttcttgatcaattcagttgatgtcattgcaccattagaataaaaagaattgatggttaaaaactgggcaaaatagagtaaggacaacataattctcattagtcacaaacaaatgaagtaggaaaattaagaatcaggtataataatcttcattgccatgagggaaaagatgtgctggataattgattgaaagaaaaaagggaggctgatctttcttgattcaccagggatgtagaaggtcgcttcaagcgttgacgaaaaattaaacctccgtagactatttgtcatctgtttctgcaaaaaaacagaaaatagaagttgagccacccaccgatcgattaaaacgaagaatgagtaagttataaaaattaaaaattcgctacctggatcgagacgataaaggaacttctgttcaaaggctagcacctattgacgtgatttgacgatgaagctgccaaaatttccaacatattcagcagtcgttgaggtggggagttgtcaatttcaaccaaagatccaacaaaaaaagtcgatcgcaaacagcccaactgcaaggcaccatcgaggaagctctaaacagttatggtgttgattaaaaagcatgatggtctttctcaaaaagaaaaaaagcatgatgatgggtttgattgctgctattaaggtggcctatcttttcagctccggtgcttgcttcggcttgtttttgtagcatgcaaacaccgagcatgtcaacagtcaagaacctgggaagccgctttaatttttcggctttcccagtcccggcggagcgtggagccacgaagagactgagaggaagcagggagcggaaacgacataggtgttagtaggtgccggcggtggtggtttcgcttctctcggatgtggattcggaacgacgcgggagaaggagagtcagccattgctaggggcggagtgggttgcagggggcagacgagcacgatgcggcgcggcgccgcagcgtctgtccccacggcgtgcagcgagatgcggtacgggagacggatggtgcagttgggagcgagcgtgagcgtgatgcagggaggcagacgagcgcgatgcagcgtggcgccgcagcgcctgtccccacggcgtgcagcgagagggatgcggtgggggaagcggagcgagatgcgggagaggaagccgatgcgggcgctcgcgcaagagaggagcgatgcggtggggcgtggagccggcggagcgagatgcgcgatgcggtgggaccggcgagcgagatgcgggacgacgcgaatgcgggatgcgtcgtcgatcgaacggttttgaaaaaaactgatgacgtggaagcaccaggaagcagagaattcctgatagtgtggatgatttgtatagatacataggattccggttcaggacggttttggaactcgacaacaacacgagggatctgaagtgagccttttcgttaagctgtaatatgtgggcccaaagtgcggagataaagaggaagcgacggggataaagatgggccgaatttagtttgataagtgggctgaaagttgagatgggctggacaccctgggcctaattgacactatgcgttaatagcagggggtccctctacgcacaaagcttcctccaccgcttgaccgtcggtctatcctgaccgtctacctctgatcacacggcccagatatagaagcgcagaatcctctccccttccggccagacctccgggctcgcggcggaaatgggcggcggcgccggcgagccgccgatgttctggcgtatcttcctcgacagcctccccctgccgataccgtcccctcgacctccccctctgggtgtcgggcgcgcccccgttgccgtcgcgtcagtggcacggtccgcacaacacacagagcgtcggctgcatcgccgggcgcatgcgacgcgttacaggtttccagcacaaccggtcggcgtcgtcagaagaagaagaacaagcatgtctccgcgacccgcgtttggtacttggtatgctatcttagtctgaagttcgccattgacattgactcaatttgtttatgcatcagttgcgcagtctgccaatcgtagatgcatccaagtacacaatcacacagggacgacctaactgaagaatatgtcctttttgtcataccggatctgtccttattttatggttgttcaacaatcaacgtatgcggcggcatctcttcttatattacattctttgttcaacaataactagcatccactgcatttcagcgtctcgttgaacggtagtagtcagtaatcagtaaacgttctgtaaaggttagccatcaataaattatcgaggaattagagaagcaacttttttaagcatagattagtaaagccgaaatttgtgggcaagtaggttgtgcagttgagcttgggttgagttcaggcaagaaaatttagaagataggctgtagtataggctgtttggactttggaatcgatctgtccaacactttgatattttgtgatgattagatgcattccctgtgattatgtgcttacatttttattctcatcaatcctttcaaagtagcttgctatcgccatcagactatcacctgtgattatgatttacatttaattttagcgatccacggctttatgctgaactgtaacaatcaaactttactatgcgcacttgtttgctagctaaagtgatatatgtgcctatatcccctatttatctattctatatagctttcagcaactttcttctttatactattgttactatagtctatagtccttccggtagtttgccaacctacctatcgcctaattttgttcctattatgaacctgtatttctcttgttggataatctgaagtacctaacctgagctcttattaagctgagtttcaggactgatgccagtctgctagtcaccaagattgatcttcctttgtcatgtttctctcagtgacatcagtagcttcattaggccttttatgtgataaataactgcaatttttaaatagggatcaccaaacccatatggccatatagaagagctgtataaattcctaacactttgcttggtctagtttgtttgcattcatctatcatacagtggtacagggaacaagacagggttccagtgctggaggggagaggaggcagcaaaaggctcgctctgtaacttactctacatgaagtcactgtagagttcagatcttggagcttccagttactagtacagctctacaggtactgtgttattgtcttgattgttttatttgaaggctatgtggaagagcatttcgtaaatgccttttcaggatcttttttttttatctctgtaggaatcagattactgtcatggttcttatattgtgcacttccacttactgtgagcttgtagtggcaccaaaggctgtatcctgtatattttagttagtcaagtaatagtagcatgataacaccaaaacattatatgtctaatctgaacaatcatttcagtagcctaatttattgcaagctcttgtgatgattttttaaaaacacttagtttttagagataccatgtctgaacaatatttagcttgatgttatctatgctttctgtaagcatatgcagtcatgttgctggtagtcagtggtgatgtcaggcagcagaacttcaatgagtcaggcgcggccataatggagcgtcaaacagcacgaaggaccccaagtagtgtgacacagatgccagaatttccacctgcttgtgttaaccttgctaaagagctcactgcaagatgcagagccagagcactgcaacttacggatgatgagatattgagcataacacaagacttggaaagtgtcatcgagaatttatgtgattatattggcagggtacctacatcagcacttggcagcaatgcttacacagatggtgcggtcaaagcactctcagtgaggggcttcttagaggatgatatgctgacaaatgcagtgaacagcatgcctaataggaagtatttccatgacagcaacatgccaaggctagtggaatttctgcagggaatgtaccatgaatccgatgaatttggaggccacttgttcagctctctcccagaggtctcagaatacattgaaccactgtatgatgcactcttctgtccactgacaaatcaggtaatgactgatcctgtgttaacggagagcggtgtgacatatgaaaggagagccatagaggaacattttgagaggtttgctgatagttctgaaaatgtcatatgccctgtcacaaaaatgccattgcaaagcaagacattgatgaacaatgcttccctgaagagcgtgattgcagaatggacaatgaggaatgaggcaatgcggatcaggattgcccgcactgcgctctcactgtcaagtacggaggctatggtgcttgaggccatacatgagctgaagtcgttggcaaagctgagggggaaaaatagggagcagatgcataagattggggtcaccaggctcttagcacggttgttggacaaccacaatgtgcagattcggcatagcgcgctggagcttctgtgctttttagttgaggatgaagaaggaaaggtaagtactaagtcctctcttcaagtacctcacctgctatttataacggtatacagaaccattcatgatggcattttattacttgcatgatggtattcaggatatcattggaaaaactaaggccattgcccggacaattaagctcttgtcaactaatggcaccgatgaaaggcatgcagccatctctttcttgctggagctttcaaagtcacagctattgttggaggatattgggtcaactgctggaagtatcctgatcctcaccacaatgaggataaatgattctgatgatccaattgctgctcagaaagctggagaggtcctaaagaacctagagaaatgttcaaagaacatcaagtacatggctgaaagtggctatctagaaccccttcagagtcatcttgttgaaggtaatgatgtttctatgtagaaattcataacttaagctgatgcataagtgtgttaaatgttatgctagtcaaatacagtagtaagaactcatctgtcatatacaacgagtcttatattgttgttttctttataagtacactactccctccgtactcataaaggaatcgtttttagacagcgacacggtctctaaaacacaactttgacttcttgtttctataaaaatatttattgaaaatgatatatgtatacttttatgaaagtatttttcaagacaaatatattcatatattttttacattttcaaacttaacaacttgaaagttattcatgatttatattcacaaggtttgatttaaacattgtcctaaatgacttcctttacgagtacagagggagtacatctctccaccatatttctgaaaatgtattgattaactgatcactcaataaagttgttttgctgcacctggtcagtggtcacctgcacatgttactatgttagtgtcctcacaactttcatcacttgaacgccccaaatgtttcttttaacataagagctaaataacttcaaagttaagaatcttttcttctcataagttaattgaaatttgagctgagatgtggaattctaaacaggttcagaagagatgcaaatggagatggtcggctacctagccgagctaatccaagagcaggagctcaccattgacatcaacggaagcacgtcgggggtcctcatcaagatggtgcacagctgcaacaccgtggcgcgtaaggccgcgctcgacgtccttgtccagctttcctctcaccgccccaacagcaagacgctcgtcgaggcaggcgtcgtcccggtcatggtggaggagctcttcatccgaaaggtagacgacgagccgctcagctacaaggccatggccgccgccgtcctcgccaacgtcgtcgagtccggcattgatccggacaacaccgtggtgaacaaggaaggccacgtcctcacgtccaagtactccatctacaacttcgtccacatgctcaagtgcttcatgcccgacgagctcaacctcagcatcatccgtgtcctgctcgcgctcaccgcgcacgccaaggcgctcgccgccgtggtctcggtcgtcagggagaaccaccggggccactccatcgtggagctcatgagctcctggacggaggcgctcggcgtcgcctcgacgaggctgctcatcaccctgtccgcgcacatggggcacaccatcgccgagaggctctgcaagacgcagggccagccgaggaggctggtcaggagcatcttccgcgccggccgcgccgccatcaccgagcggcacgccgccgcggtgacgctcctgtcgaggctaccgtaccggaacgtctcgctcaacctggccctcgtgcaggagggcgccgtgccggcgatactgcgcgggatcgaggagatggggagcggcgcggcgaggatgacgacgagcaggcacgccgcgccgtacatggagggcctcgtgggcacgctcgtgcggctcaccgcgacgctgtacaacccggacgtgctcaaggcggccatggaccacgacttcgcctcggtgctcaccgccctcctcgccggagcagccggtagcggcgaggtgcaacggctcgccgccgtggggctcgagaacctcagctaccattccatcaagctgtcccggcctccgccgccgccggaggacgagccgcggccaaagaagatgaccatactcaagcgcctgaaagacgcaagggtgcataaccatagcagcagcaagaacccaccgctgaacgtctgcccggtgcaccgtggcgtgtgcacgccggcgacgacattctgcctcctcgaggccggcgccgtcgagggcctcctcgcctgcctggagaacgacgacgcccgtgtcgtggacgcggcgctgggagcgctgtgcacgctcgtcgacgacagggtggacgtcgagaaggccgtggtcgccctcgccggacagggcgcggcgaggcgcgtgctcgcggcgctgaggcagcacagggggaacagcctgtggcacaggtgtttctccgtggtggagaagctgctggtgcacggggacgacgtgtgcgtgagggaggtgaccggcgacaggatgctgcccacggcgctggtgagcgcattccaccgcggcgacgcgaacgccaagcaggcggccgagagcatcctcaggaggctgcacaagatgcctgactactctgcaacctacatgtccgtggaattctagtgctttcatttcatcgagtaaataaatatataccaccggtaaatagcagcagatatttgctgccgtgcatatatgaacatgatgtttcatacatcatcttgtacatccggtcgcaaaatttatctcagtagcatatccatgatatgttgtatgaaatcttccaaacgaaaatgaaatgaaatgtctcacttttgtaatggaagatgtaaccgtactcgtaaaagaacagttatgaagatcatggaaggcccaataaaatccgaaatacagatggaaaggcccagcccatatacaactcaactgttcatcctctcctcggagacaaaccctagctctacaaaccctttagaaccctagccgccagggagggactgaccatgaccatccagtcgcccgcctcccacaaaaaggattcagcaatcctgttcgctctgtgcgatcattttcctttcttttttttttcgattattgttctcgtccttcttcggtcttgtgctgcggggatgatttaatcgtggttttacttcgagtgtgctgatttgatactccattcttttttgctagagccttggagtagctattagacaacaagaattaggtacttttgtttgattggtttatttaagcgcatgctgttcttggatttgatggtattgttgtggtcgactcgcaccattagccccctgttctcttgagattggatacagggaaaactgcgagaaaaggatatatatgggtgctatatccatggattggacaggggctctaaacttctgtggaatccagcggtttcctcagaatcatctcttctgtccacattgttacttatattttggttgcacttaattcattttaatgcatttgcatttgttgttgtgttctgaagcgaaatgaggaggaaaaatcatccgaagtttttcttgtggaaaacacgtacatggtcttcaaagttctctgatcgctccatgttaaactaatttttagtctcttgatctgtagctatttgtaatgtgggacaattcatttgttgatttgggggaagttttttaatcgtgttcaaagaaccaacatataggtgtgaagcaaaatcggaagtcattgcatctgaaattttagtgctgatctgctaataacgcataggcagtcaccaaagttctttggttgcttttctcaatgcaatctttgttttgttttccctgataattaataaagtttatcattgttttttcccattctgtggctattatgttgtacctttatggtgttttgaatgatgtatagtgcctttgcctttagttgctgggaaatggaaatcaaaatgaggaggctgtttgttctgaagtatctaatgtggatacatccattcatggtcttcaaagttctctgattgctctcatgaatcccatgcaacatcagcatgctatctaagatcatgtattacttgcttttggataatgcttgaattgacaatgtagtgttttaattgtgtagagcaaaatgaggaggttatatgatctgaagtatctaatgttgataattcaaggtcttcaaagttctctgattgctctcatgaatttccattctccaagtaatatgctatctgatatcacgtaacactgacatgctttgggtgatgtttgaatcgaaactttgtttttagatttctagaagcaaaatgaggagatcaatcgatctgaagtatctaatgttgatacatccattcatggtcttcaaagttctctgattgctctcatgaatccccattccccaagcaatatgctatctgataatagtagtaacactgacatatgctttggatggttttttaatttaaactatgttttatgattcctggaagcaaaatgaggaggtcaattgatctgaagtatctagtgttgatgcatccattctttttttaaaaaaaaaaaccccgaaagtggcaaaagatttgccgaatatattagagggaataaaagccaagattgttcagataaaagccttgcaaaaagcaaaacaactgattgtttctcatgaatctctaagcaagattgttgattcatccattcatggtcttcaaagttatttgattgtttctcatgaatctctgagcaatatgctagatcctgtagttcttgctttctagcttgggttttgttacattgtttggtatgaaatttgagtttttttggacaagacaatcgtctgttaagttgttattttccgttttaatcgtgttgtcttctaatgtctaattcacctaaaccgcaaaacttatacaccctctattccataatataaggcacaaccactttttctatatgttccataatataaggcatgcatgtatgtaggcaatttaactatgaccccttctcctttaaattattacttttttaaatcctctactcatgttctctaattctattggatggatgcattgtatttattaggatgatccaaactataatatgataataactattttctttgtttttgggttaaggtggacttggtggttatgccttatattttggaatggagggagtatcattcaacatgaagaccctcttatatttcttttgatattttggaaacgctccccttttcttggccatgaccaatgtacacacagcagcgatgaactcggtttgaagtaatcatgtcaactgactgtctcggctgttgctccaagtaggggtgaaaacggtacggaaacggacggaaacaacctttatcgttttcgtttccatatttttttcggaatcggaatcggaatcggaaaccccggaaacgaaaacggaaacgaatattatcgaaaccgaaaacagagcgaaaacgaaccggtgtggatacggtaacgaaaatttatcggaatacagaaacccctcaaactgagcttcaaacttttgtgaagttcaattctcaagttttaacagtcaacaattcattataaaacacaattatatgaagtctaattggtaagtctcaacagcaaaatatattcttctataatttcatataatttgtataacaaatattctaaaaaaattacagcaaaataccatggtataaggtataaagtatacactattagcccgtagcccgcagcctctctctccctccacgggccggcttccccttcccctcctccctcttcgggccgccggcccagcccttttgctcctccctcgccgagaagtctataatgcctccttcctctcaattcaaatattttttagggtagtaaatgatttcaaatgaaaaaaatgtcaataacaaagttgtataacttatcaagatcaacaacttttgttttggtcattttgctatatgactttgtttcaataatttgaatttgaatttcaaattatgacaacttcaaacaacatttttaaatactaaatgatttcaaatgaaaaagtcatcaacaacaaagttgtataactcatcaatatctacaacttttgttttgatcattttgctatatgactttgtttctataatttgaatttgaatttcaaattataacaacttcagacaatattttcaagtactaaatgatttcaactaaaaaagtcatcaacaataaagttgtataactcatcaatatctataacttttattttggtcatttcttcatccgataaagtgacagtaatattattcacaaattttacatatatctcctatagtctataaactatataagagatatgtacattttgtgaacgatcttataaatcactttatcggatgaagaaatgacccaaataaaagttatagatcttgatgagttataccactttgttattgatgactttttcagttgaaatcatttagtacttgaaaatattgtctgaagttgttataatttgaaattcaaattcaaattatagaaacaaagtcatatagcaaaatgatcaaaacaaaagttgtagatattgatgagttatacaactttgttgttgatgactttttcatttgaaatcatttagtatttaaaaatgttgtttgaacttggggaggaattatggactatttggatgggcctttttaacttcggaaattccgacaaactttccggaatttttccgaccgattccgagttccgacggaaactgatattatcatattcgattccgtttccgaaaaaatatttccgttttcgattccgtttccgcgaaattccgaaaaaattccgaccggctgattccgttttcgaaaacaggtccggaatccggaaaaattccgaaccgttttcacccctagctccaagtcgagggctgaagccttgaaggaagctactacatcctaatagtagtataatatttaggaaaatagaatttagttgaactgtaaacctgtccagagataatatcgtacattctgtatggtagtattactacattgttcagctgcaccgaattgtgcattatgtaaacgtacaactacttgtcataaattgttgttgtagtaggagtaactttgtgtaacaatagcttgttcagctgcaccgaattgtgcattatgtaaacgtagaactagtacttgtcataaattgttgtagtagtaggagtaactttgtgtaacaatagcgtgagaaatcaatacaggaatacttcccaattcgcagtgtttttgccagtcgtttcaggttatatattatattcgtcaacgtaatgggagtttgaattcaatggtgatacctgctggtcattagattgtaaagaactcaactgcagtcaataaggttgaaaactacagtactcagaatacgaacacttgaattaaacatggtttgggttttcgaaatacaacactcgaagacaaccaaatgttttagaacaatacaggtaggagcatcacaagctaacagatggctggatgggtacagcataggaagcattcctgcgaagctctgaataggcaaagttaaccagggccaacttttgggatgtcgtagtgctcgctaagatttgccaggtattggttgaagtcctggatgcggtccctgtgtgacttgttggctactttggctagcttatgcatgtcaatcttctgcttctgctccatgtaacgcctctcagctggggtgaggtgatcatagtcgccttgcaggttcccttcttctcccatcttatcagcttcagtcaattcatcattagggtcagctggtacttcagagcttccacctgaagaaaattgatcaaattaggtgcaaaagtcatactaatgcagttcacttaaacaaagtgaaaagtgtgtaatatctgcaatcaaatggttaataaagtacgttcagcagaaagcaatttatactgctgcacttgcttaaccaaacaggaaaaaacatgctgctatgtgcaattaagatattggacaaatgaacaaaaccaacttgggtgggctgtcaaatgataagttcctgttcaatgctttcttctgtatcgatttatccaatactaatcaatactgtatcgatttatccgatactaatcaaaagtattggatattattgagggtaatccaaaaatcaaaagtttgggaaatatgttagtatctgtcatatagcatcataacaataatcttgaaaatcctaattctttaattcggcctaaatgtccaaggatccatgcaaacacaaccatttagggtatacagttatgaactatatagagaattggctcttgtttgttcaatataagctatatttgacatggatagagggctgagcctgactgcctgaggcacctaatctaacttatcagtacaaaccctcttttatccaatacaaaccctttaataattagttcctctagtaagtagtaatgccaccgcaatatttatccatcttgctagaaaaaccatgtcagctagcagtagtgaaaaccacagagtgctcaacacaaaaaagtaagatcaaaatcaacattaatcaactcaatagtattgaaacttaagcaaatagacgtgttacaggcaacaacaatccactcaatagtatggaaacttgcaataacaaacgaaagagcgtttagaataagtactccatccaccatgtagccagcacatgtaaaataaagagtaaatttcacaaaactacaggtattttgaccaaattatcacaaaactacagatttaaggagttgtatcacaaaactacacatttagcaccaaatttatcacaaaactacatattttaggttaagtatcacaaaaatgcatatttaatattgaacttatcacaaaactacaacttttagagtttaaatcctagcactattgttatggtggagctataaacattattactttgtgattaaattggttctaaacctgtagttttattataatttagttactaaacgtgtagttttgtgacacttcatcttaaatgtgtagttttgtgataaatttggtgctaaatgtgtagttttgtgatacaactccttaaatctgtagttttgtgatagtttggtcatagtatctgtagttttgtgaaatttactctaaaataaattactagtactcaagagcatatgaactattgcagttagcgtgcggataacaaagtaataagtccaacgaaatcctaacccacacttagtcgtttagcaatctcaatagaacaacgagctttaccttggtgaagctctccgtgcccggcttcagatgactcctcgcggtgctgcttcttctttttcttcttcttgactcccccttccttcacatccagcgccttccccttcagcttgagcctacccccaacgacgttctggtactcagacatctcgcctgcatccacaacccagacataagcaaacttttgggggaacaaacaaactgttacacaggttaaggctctgaaattaagaggagcttcttccagattccagacattaagtactaccggtgggagagagatgaatcagatgatgtggatgctcaccaggatcgtcccccccccctcccctcccctgctcgccagatggagatcggcgcccctcccctgttcaaccgcgagatggcgcaaggggaagatattcgagtactccacttttatcttgtttttgtaagtaaatttcataaactacggatgctttagctaaattatcacaaaactacagatttaacactaaatctaccacataactacaaattttaagatggaatatcacaaaactatagatttagtaacaaagttatcacaaaactacaggttttattataaaacttggatatttataagtcgagcataacattagtattaagaaaagagatcgaacagataaaaaacatcagcggatagcaatcaggcgcagatcacttaggatgggaggaggagaaccctagaaaagaccacggcaaagtatacgaaagtgacatcgacacgggcaaattagggctcagctcacctagcgaaagaggtcggccaggatggatctccacgccacaccaacccggagaaggagaggagctcgaggcagtggaaggtggccggctggccgctccgcgtccccgagaagcgagggttcggcggcttccgatttggggacgacgatttgatgggaaagagagagagaggatgcgagggcagccgaggaagggtaacaccgtaaattcaaattgggccgtgagttgcaaaaccgccagtagaattggaaggaatggaataagttcactttgactcccttaaaagttactcgaatctaatccatgaccctaaaccgcaaaaccggatatctcgacccccgaactattaaaaccggtgcaattttactccctaggtggttttggagggcggttttgcttacgtggcgctgacatggcggtgttgacctagtctatggggttgacgtggcgcttaggtagcatttgaattaaaaagtatccgtgggacccgtttgtcattcacacacttaaaaaaatgtggagcccactgacatgtgggccccacatgtcatcctctctctttcttcttcctcccctcttcctcccttctctctttccttctctctctccccttccgccggccgcggggagcatgggctggagcggcggcgggagctaagctcgccaccgccacggaggtcagccccgacgccgttggaggcgagatcgaccggtcgtgcaagtgcgtgagccttgggcctgggagcctgacgggattggaccgccacggagctccgcgttggctgcagctcgggcgccctggcccaatgcttcatgccgcagctcgtcgacgacgtcatgcgcgcagccgccgagagggtctgcgtcgtaagtcgtgacccaccaatgaaaacaaaaaaaaaaaaagaaaatcagccatccggtgcaaattcaccacaaaagcacggtgaaaaccacctgttaattatgaaatctccaccgcgatgcaggagatgggaaagagcaggtatcggagttctctttatataggctggaggggaggaggtggaccacacggacggaaaacggcgccggcgacggtggagctccctattgaagacactggtttaagaaatcgattgggggcgatttagtgcgggattaagtgggatttgttggggaaattgatgcccactacacaaggaatcgatttttgcaaataatttggaggagaaacgatagggcagggagatcaacggagacggcagtacttgagtttcactggagagatgaacagacgacggatagaggtggaagaagctcctggcgagcggggtccgcctgccagcgcacggacagcgaatggaagagaaagagaggggggaggacaaggagaggatgatttatgtgggccccacctgtcagtggtcccacggtgaatgacaaatgggtcccacacatattttttatttctaatgccacgtcaacgccacgtgggaaggagtccgagtcaacactgccacgtaggcaccacatcagcgaaaccgccctccaaaaccaccgaaggagtcaaattacactggttttgagaattggggggtcgagatatccggttttgtggtttagggtcacggattagatttcgatcacttttgagggtcacaaagtgaacttattccggaaggaatcggcatgcactttatctacaacaaaacttataggtccagtagagatgggccgaataataggtccattatcctttagaaactagaccgaaacgaataagttcatctcaggtcccttgcctacgaatccgattaaaaccttaactgtcacaatataagtcccatgatgactttagctgacgtgatgtctattggctaatttaactcagtttttatctgaagtggcacatggaacaaaatttaataattttaaaaacaaaacaaaataaaactgataggcccagtagagataggccaagtaatagacccattagctagaaacgagaccgaaattagctcaacttcgtaccaaaaacaaggcgagtaaaataaaacaacagattttgaccgcacgaattgcatgtgatttttgggtaaaaaatggttcaattgcccacatctcatctaccgcacagatcacagaaatcatcgctgtttatttcactttagtctgcacatgaacaatccggtgaggtgccatcattggcccgaagtcctaaacttcggcggcggcgacggaggatggcagtaggtgcattggcagccaacaggatcgcacacaccaacgccgttataccggagggagcagatcgccttgcatgagtccggatcgcagttctcgtccggcgggtcatacacccttctgcaggcttcgccgcccggcggcgggacgtcgccgccaccctccgccgtcgtcgccatggctgcaaaattgatccattttcctcctggattagtcaattaggactcaaaaaattgtatcggagaagttccgtatacctgaggaagagagcagaagagcgccgatgatggctactaggaacatcacgcggtccggctccattgatccctcctcccttgcaaaacaaccacctgcaactgcaagtctgtcttacgaatacacggtggatttatacttgatttggtgcgtagtatcaggggtatttggtctcagttaggcatggcattgatcactcagttaatctctcgtttaatagattgccggatatgcctccgaaaagctaaatgtgataaaaggggaagccattgatgcgtggatatgcaaggatgaaactttataagaatgacagctgataatggagtttttatcctctcttgaaccttttcaattttttttaaaaaaatatataaaccctctcaaaacttatttttaaaatttgtatctttcgtgaaacgtgttagtattgtttcacaccagcttgacacgatcaataggtttagatttggaaataagttttaggataatttagtttcaaaattaaaaaaataaacatgttcaaaaaataaaaaatattcatgataatgtgggggcatcgaatcaaccttgatttcatggacctaatgggccgtgtcttcgtgggccgacagctctctctcactctatccctctctccagcccaccaaccagctggtcgatttgacaactgacacgcacatctcgtctccttcctctcacggcgcggggcgtccggtacaccaacccaaacccaatccaatggtaaagcgcccgaaaagcaagggaaaaagaagagaaaaaaaaaaatagagagaggtgtagcgactcgccaagcggagaaagaaaaggagaggagaggaacagcgcaaacgtcccccccgtccccccaacctcggtcgttgcccaatggcgaatgattcctcctccttccctcgcagcctccttatcccgctcgccgccggcggctgctccgacgatgacgacggctacgacgagggcccgtcggacaccgtctccttcccctccttctggccgccgttcccggccatcttgtctgattccgactccgacgtcgccttgttccctcctcctcctccccacgtggaccactgccctgcgccgcagggcgccgcgtcggcgttcttcgggctcggtttccgtgaggaggatgaccacgatggcggcgagtgggcgccgccgggcgaggtggagttgcctctctgttgggattgcctgcagctggaggagcccgaccaccagaggtgggacatcggcgtgaacggcggcggcggcgacgagtgggagcaggtcggcatcagggtggaggaggaggaggaggaggccgcggcggcggtgaggagcctggagtgggaggtgctcctggccacgaacagcctcgggagcctcgtggttgacggcgccgactacgacggtggaatcgacacgttcttcctcgacgacgccgacgacgtgctgttcgggcagctcgccgcggagcacgagccccccgccgccaagggcgcgcgcgcggcggcgaaggccgccgtggagagcctcccgaccgtggtcgtcgacgcggcccgcggcgacacgcagtgcgcggtgtgcaaggacggcatggaggccggcgagcgggccaggaggctgccctgcgcgcacctctaccacgacggctgcatcctgccgtggctcgccatccgcaacacgtgcccgctgtgccgccatgagctgcccaccgatgaccccgagtacgagaactggaaggcgaggcgagcagccgccggcggcaatggcgatggcgacaggtacggcatcattaggcaactttcaatgattgattgaatattaataattaaaagaggaagagagattaatttgatattcaggagttaggcggcccaaaaaaggatctttttgatcgagaggggaagggaggggatcgaatcaatgtgaatttgtggcatttttttttggtacagagtgatgataatacagtgcattttcaagtcgattatggtagagtgatgaaaatacagtgcatttttaattcggttatggtgtatctcgaagagaattgaagcactgacaaaggcttgacgagattgttgtttcttgtttatttataacggaacaaaaggattagatattcgttcgggaaaaaacgattagataaaactctgttataaaaaagggaatactccaatattcagtacggcataattttcattcttcgaactattcagaattattagtctgtacaagttcgatttcacttgtaacctgttctgagttctgacgaacggccttgaacatcacaagtagtcatgggaaaattaggaaatggagtactactcaattattccagttccagttccagttgaacggccaatacgtactcctacttcctttgccaatgcaactcattaaatacttcgacagggtcaaacatttggaaggtttccgtgcatgtatgatatcgtttccttcacgctgtcactggtgtcccttaggccatagcgatgcaaacctccaaaaattccgcgtaatcaccttgtatcttctcaccgtaccttcgattaaaactgatggtttgcatccaagctaagcatgcaatcgcgcgcacatcacaacccgcggataccaataccagtataccacgattccaagcctgtcatgtactcatgtgttgaaggcaaagagcgcctttctacgtagtacttgccttgcgaacgcagcctgctccagtgctcagccatcaagtttccgtggcttggaagcgggggctcgtggaggcgcgcggcacatggcggccggcccgtcgtccccggcctcgccctcgcccgcgcccgcgcgcgtcggagtcggagagaaagaaagccaagtacgaaaggatggaatccgatccccgcggacccatctctttcgtgccacttcactttgctcatctcccaaccattcgttgttcggtgcgcagcagccgatcgaacgcacgtcgtcttttagttttctagcacgtgggcacagacgaagacgggagatggtagtactccagtgggcaggagcaggatctctcgtttcgtttccatggataaacgtgttggaagcccgcacgagtcgatcgggtatggcaggcacgtcccgtgtgctgtgcggtgcggtgcgctcgtgttgcgacttagggcttagttaagttcccaacaaaatttttcacgctgtcacatacatggagtattagatgtagaaaaataaataaatacacagttcgctaggaaattacgagataaatttttaagcctaattgcgtcatgatttgataatgtcatgttaaagtaaatatttcctaatgattgattaattaggcttaataaattcgtcttgtagttttctggtagaatctataatttattttattatttagactatgtttaatattttaaatgtatattcgtatatcggatgtggtataaggggtaaaattttgtgcccagctaatcatgcccttagcgagccgcgtgacgtgacttgttcatgctctgaccggaattttctctccctctccttccgcgtgtgtttttgatagaagtgtacctggtgtgctctgctgtctgccgatctttcctcagttcttgacaaagttacttaacctgtgcccacttctaaacggcccagtttgcgccaattactagtgtaaccctaactcatcttctcccagtcccccaccaaccatagttattaagaccggaccggaccggtggtcggactgaagaaaaccggaaccagagcctctgccggtttggtttagaccggatatgcaatcaagccggtataaacaggttagaccgtccggtttttatgaaaaactgctatagaaccagagaaaaaactgtggttgaaccggccttatgtgcgcgggagtaggtgtgactctaactcatcttctccccgtcccccaccaaccatagttattaagaccggaccggaccggcggtcggaccaaaaaaaaggggaaccaggcctctgctggtttggttcagttaaaagactggatatgcaatcaagctggtataaaccggttagagcatccggtcttatgtgcgcgggagtaggtgtgactctaacccccaccaaccatagttattaagaccggaccggactggcggtcagaccgaaaaaaaagggaagccggtttggttcagttaaaagaccggatatgcaatcaagctgatataaaccggttagagcatccggtttttatggaaaaccgctatagaaccagagaaaaaaccgtggtgcctgctttggagggatttgaacacaggacctcgttggagggatgaagctcaccaaccaccaggctatcatcatctgttagaaaggaatgagtaatatatttaataactattgaatcgggttagaccaatgaaccatcgaacaaagagcctcactggttcaattaccggtccggtctcaataactatgccaccaacgtattcgcgagccacagatcgagcactcgcctacccccctcgagccaccacctcccggctcccgtgcctgatgacctcacctgcgtcggaaggcaccaacagagttacagagcaaaaaggctaagggttcgttcggtttgcaggattttcaaatcaaattatagaaataggaaaacgatagggattgggttggtatgtatgtgcaaaacaaatgataggaaaaatatagaatttaatcatttggttggttggtaggaaaaaataccggaatacttagtattaagttaacatgatcaagattgaaatgcttttaatccatgcaacttgagccaaatacatagaataagaagtgatatacctcgatcctacgccgtagaaatagaaaaaagggctcttcctttgctcaaattttcctatgtaattccttaagaaataagaatcatagccaaagtaaatttttctatgctttttctttgctcaaatcctacaaaacgaatggatgaatagtacataaatactttgttttcctttcatttttcctctaaaacgaatgagccctataacatgatcggccgtgagtgcttgcaccgagcggtaatattagacttatttttggcccagctaacgtgttggactgtttcttttttttcttttcttgcatgtcatcgccatctctgctgccggaatcatatgctccgcggctgctcctcgtcgccacaccgcttgaagaaggaaggagagcgagagagaagggggtcaccgtcgctactgctccaacgccctccctcccacctgccgccgggtgcgccggcaacggctccacggggaggggtgggggaggaggccgacgacaacccgcggggaggggcgttggtgatgccgtccgtggcgacggtcaaggcggtggccggcggcgttgcttcggcaacagcgagctgccgagcagcagggcacgcaagcggcggcacggcgtgggcaggccataggacgcaggcagcgatgcgaccacgcgccgtagacggtagacccgtagtgccgagcggcgagcgggcgagcagagcagacgagcagcagcaaagtcagcaactagcagagcaagctccaaatgcaaaggcagccaagccgtgattcctcactccatattttattcttttttatttcagcagcagtagctagaatgctagataatgagatttacaagaattgaagcctcattgtctcatagctttgattttttcgtagattagtagctatggagaagaaaacaacattgttaaattattttaaaaacgattcaagtggcacccttccaactgatgagatggagatcatttcaatggaattcattagataaatttgattggttggaatatagtgtggaaaaggatgcaaatatgcaatcactcatttcctaagtagcaatgtattttttttacggtttctttttcaatcatatatgtgtgaataactaccttaatgtggttttttttttcaatcatatatgtgtgaataacttaccttaatgctttaaagttgagcctatcctctatttctatcctggattcgccactgatgtcacgtagacactcacgtaaaaattatgtcacatagatttggatgtgctcaattaaatatagaataagattcccaggttgtacagagaaatacatatagaaaacaaaggaacgataaaatagaaaccaagtatagagcttatttgcaaatatagatgtcttatgtccttctcacaaatgcgcgcgacatcctaatcgatcactcagcttctaactcagatagtcaaggtctgccattttgtcctatgcttatataaaacacgcaaacttgtgcactagaatgagcattttgtataattgtatactactacctccgtttcaggttataagattttttagcattatccacattcatatagatgttaatgaatctaggcacacacatatatcttttttttaaggaaagatcattatatttaataatgacccggctttggtaagaaagccaagtagattcgtacaggacacacacatatctagattcattaacatatatataaatattaacaatgctagaaaatcttataaagtcttatagtatgaaacggaaagtactatattaagttcacatactgtcatcgtaatttactcttaaaaaacacttcctctagcgaaagaaaatcatatggtgcgatctctggatgatgatagaagggacttccctgtccacataatgacactatgctaaagttgttctaaaaaggatgggctaactttctagcccaaaaaacatttaaagtttccaaccgccctattatttttaagaaatgggaatgtggaaagggaaacggaggaagcattgccaactggctatccacacccagcacataaaaggacaaaatgtaacaacattaggatctaccaagcagatctactaagagagcacggcaatcatcatggatttccacacaaggttaatcaaaggatttaagtgccatttagcaaaacaaaagcaaacaaaagaacataagtggtgaaagtgaaattttcttttatctttagtgacgcactcaaggctcgcacgaagtgttgccgcaatgaccgaaaattcgtactgggacgaggcatgtcgattgcgtgtgccaatttagggtggaaaggtagtccactagagttactaaacctctaaggccatcttcaacgcatctaaggccatcttcaacgcaaggagcatccccatcatccacgtaagcaaaagtgaacaaacacctagttaggaatatgcctcacacagtgtaagccatacccccatcttatttttgcactgcagcacatgtcagtcgatcacattttgcatttaaaccttctattgtttttatttgcatatgcatccaatatttgcagtataccccctaaaaatcacaaacatatataaaggccaacccctccctttctctatccctttccccttcccatcctgtcctccccttcctcggcggcgcatcacgtgttctcctcggctcctcgagtagcggcggcggatcgaggcggcggtggccgggatcgacgggggcagcagcggatcgagcggcggcgccgccgagtcgagacggcggtcgcggatcgacgcgccggccgcgcggatcgacgccatcgtcgtgggggcggctcggatcgacgcagcggtggccgggatcgacacgccggccgcgcggatcgagcggcggcggcacaggtcgacgccacggccgcggatcgacgcgccggccacggatcgacgccacagcatattcccttctctccaatccaccccctctctccatcttctcagtgcgagagcagcaacagcacggggcgacgcctcagggcgacgcctctcctccaacgcggctcctcgcccgttcctcgccgaaaagctgccgaaaccacccgacgctctgcagggggtcgcggcgctaggcgagggtgcggtcccggtcgacgtggagcgaatattctcctcgggagcggtgagaccacgctctagtgtggagcgttgaagatgacctaataaatccttcactttgtgcatgctgttaatctcgtatctgtggccctgaatcccccgggtccaccaacgtgcatacgctacgaatttgagctaaaattccagcacatacatgtggatggtaaagaaaatggggcctatccaaacaaggccatcccgttacaaagtaaatcacgggtataatgaattatgatttatgaaaataatttcttcgggggtgtcattctctcatactctcgccactgacgagtgacggccatagttcaggcgccactggctaatttcttccatgcgcaattgcccggtgctaatggagagatcacatccgacaaggcaacgtcgctttgcatcactgcactgcacgtctgcacccctcatgtctccatgcccgtcgctgtcggtgcactcgatcgctggttttcgctggctgacatgcgggccccaaggagttaggttagccacgcacgatacatatgatctcacattctcactcatcggcgctcgcgaccggaccgaaccaaaccgggccccgcgccgcgccacggccgagcgacaaagcggatagggacgacgcgcgcggggaaaacgacgagttgctgccgctgctcgcgcgcaccggcgcacggcacgtacgcacagtaaaaccccgtctccctctcgcgggcgggcgcgcgcactcactctcgcgaggcaaaagcaggcaggggcacgcgcctgggtgcgggtttgagggcgacgcggggcggccggccgcgccgggcttcgacaccgcgccgcgcgctacgcgaggcctttgaaagcggcgggcaacacacacaaaaaccaaccaggccgtgacgcgagtgagaggccggtcgcgtccgcgcgcgtggcgaaagatcgaaacgcacggatggagtggccgcggccagcgggtgatcgacggggcggggatccggtgaaatcccatgcatgatgagcgaacggatttcggccggaccttttgtttcgcggagtacgtaagcagcgagagcctcggcgcgtgcgatcgatgcgtgcacgtctctgtcctagtaccacactactactgtacttccgcgacggcgcctttcgacgcaactagcattagcgtgcatgatgatgattaactaatgatagttgcttagccaggtaaagcgacgcgtagtacttgttcatgcatgggttagctcgtgacagcaatatacaacgagcacgagtgtgcgctggtgttagtttcgccggtaaaattactgagttcgcctctattagaacggatttttgaccaaaaaaaaaagcacggaagccctcaattatcagagccaggttttgatcctgggacctgtgggttatgggcccaccacgcttccgctgcgccactctgatgttgttgaaatgaatcgttttgtatgctatttgtaaataatttgagaacctatacgtgatacgtcgagttaacctcatctgtcttcataacgtgtccaaaaaggctggattttgcggagtttacaggacgcgtactgtacgcgagtcccacgagcggataagatgcaacagactgcaggtgcacttcgatcatcagagaggcgggagaccggaggtagtgacaacgtgctcgcggagtcgcagtggctcgcgcggaggcggcagcaaggaaggaaaatgtcaccgcacgcacgcacacctgcgcgagcccgacacgcgccgggggcccgccaccccccgcccgtaagagcaagtttaatagtatagccaactaactctaaattatctgtagccaatataatagccaattcatacaatatttgcttactatactattaatatctgatcctatctactatcatgcacccaatacgtcttggaatccgtgctgcagctggctacagatctgtagccagctgctcctctctctctttttttatctttttaaaatatatttatagctagcttatagcctactattttatctgctctaatgccgttggctccctcctccgtggcaggcaagaccgcccgcccggggccgcccacccccggcgcctccatccggtcgtgcactactcacctcgcgcccgcgtctcccccgcaattctggctttgtaacgccgatctcgcgccggtctcatgcgtcccgattgatttctcgcgcgtcgtcgaggactctacgggtgcgggtgttgacccctcccgtcgcgcgcctgcctcctcggcgccaccgatcgattgacccctctcgctagtccagtggctcgccgagaggtggtggtgagtggtcgcggtcgtcccgcgcaatacgcgtgtgttggccttggctcggctcggctcggccaggccgtgcacgcgcacggacagctacggatttgtggctttcgtctactactagtttgtgcagggtgggtgggatatggacgctgacggctttcgtttccgagggccggctggctttgctttatttcacttcacctcggcgcgcgatctggcgatttgctgtccgcgcgatcgacctaaggccctttgtttgttttgtggtacgtcgtgggtctgcaaatgggcggattagcgattgactaaaatgagttctataggctataggccatgcgcgtgtcgacagctcaaacgcgtcggttttcaacatttgccgggtgattcgtatgttggggtctcaatcctcagaacctccaacaaatctggattagatgttccaatgctcaacccactattaggtagcaatctctctgaaaaatgtaacacattgtgcgtcctgggcggaacagtgtgagtcctcgttgaaagttcaaacatgcaggaattaggaaacgggactttggagaaccaatatgatctactcgcattgtcggcctaggacttcatgtgcgctgctacaacacgagggaagcattgggtacccctctcaggccaaatctttccagaaagcacatactagtagatagctagacctgcctttctttcttcaaagctcatcatcatcgacatgtcgacttgtacgtgaccgtgcggctctgcccaacttggctgcctttttagaacagcagcaccgtgtgtgcgcagacatcaccctagcaccaccagtatcagtctatcactaccagctttgccgtaaagattttgcctcgttttccgtagtctcgtaccatctacactccctgtcatccctaattaggttacaatgggtccagcctcttccagagggctaaacgcatagcacagttttattgtcctcttccaggacaatgagagctttcgacggtgataggacgcgtaatcgcgcgatccaacggctgaaagattctgtgtccaaggtcggtgactttacgggcaggatggatgcggctgatgggagttgccggacgcgaatctcacaagggtatacgaaaagaaggaaaccaatctttgtgtaggccgatgcgtctttgcttttttggatgtttttctcatcaacattattgagtaaggatagccaatcgactgtatggaatccggaagccaagaagaaagctaaccaggttatccagtcaaaattttcatttcaatcggtcctgatctggccacttcgcgctattagccaacagtaagattggtttccagattgtgaatttatggagtacattgctctagaagaagagtagtgactagtagtgaagcgagcacaaagagaaattgaaaaggttcaaacaaggcaggtgctgatgacaaaagcctctcaaaaaaaaaaaagatgattgcgaaggttatcagttattaccttcatgcttgagataacggcacaataggtgtttgattttatctgggattgccttaatctctaatcctttgacatgtctgttttctaccgggaacaatggaaaggtgaatcaaatggccatggatcttgtttttcctccaatgatgaccttgttttgcaagttttcccttcattcttgtgttcaagatctaaagagacaacgggataagatttccctgtcctccaaagacgacagcctcagacagccacgacaggcctagaccatgtaaaaagtccatatgaagtggattgcgttggatgcgaaatgatattaatgccgtatggaatctcaaatcgaatccaattgaatttgacctctcccttaactcccggagcctgactcctctatagcatagccattctacgatcccaccccaattggaacctggatggtaacaaagtgaagactgcagattttctgaaactgctactttgcagactgttcactgcaggatttgtgtcaactgcctaagtaactcctgataatgaattgcttgactgatctagtggatcgtttttttttcagttttttttaaaacataatacacacttccatatcctgaaagaaacttgtgcctgaagagaattaacaaaatatctcaatgttaaactataactatgttcaagcgactggaaatttgaaaatcctacagcatatcatcctatctcgagcaactatacatatcagaattatatgaaccattcaaaatattcatatgcaatattataagaatatattttgtgcaacattacctcgatggagctgcacgattgcattcctagaccaaatgacagctcatcctagagatttttgaagatgaatgtatctcatctgaaaaattcaccatgcaaatagtaacagatgataaatacttagtaggattttatttattggcttcttagatgtaaacaatatataccaactctccatcaactaaaaattaaatagaaataagagcaagcataccaagaatcttcatagcctcgtagggtagctatgcatgagagtaaatttccatttaaaaaggaatcagaatgtttgtccttcagtttcattggtatttgatatgttggttcttttattcaggacttatagtgaaatcaagagcaagttagtgccgtcttaagtactcctgaacacctttaaaaatacatccactctctaggaacaaaatgctagatttttctctcacaaaagaaaaaaaaagattgttaggttccataatttttagtatattaaattcaacctaaagtaaacaaaaataagggacaaaacaactagaacactgaaattatttaaaaggtgtggcttgctatctagtggatatgcttttcccagttgatgagaagatcaatgccaagttaccaattgcagaactgcacgtcctctttatccaagaggaattccactgggggccacagtagtggtcataaggcaccaagctggcaaccttagtacttgcctctttttctccttctaaaagatgttcccgttgcattagatctatcagaagaatgaagaagccattgcagaataaacatccctcaggacaaccgatttcaatgttatcatgtattcttgcctcactgtcatccttcagaaaatgaattgaaatccagaggcccggaactaaatcgcacgtgtccaaaacttcaaatgcaactctgttgaaaacaataagctgagcatgtatcatagccagcagagttatttgatccatgtatacgcctcagctttacagtccatttcccttccacaattcaccacaaatgcctgtcactgttagccacccaccatctctttaaatggtttgagcacctgatgctagtgatgttgccaagggccctgcacttcatggtcctttctttgatcacaaatcgacagtctggatggaggcccttttggaagcatactgggaccaatacatttagaaaagccggcacaataataaaacattacatgatgtccatcaggacctattttaaacctcagtctcatgtatgcaagcctgttgctgtccctgatctctgtacatccaagaagcacagaaagttaatttgaacattgctgatgttgggtcctgtacacttccaaaatccttgtgtgctataaatccaccccactaccctcttgttttctttcacaagcctctcttccctctattcatacctcgagtgagcatgtaccctgctgagattgctagttttccatacttgtcacctgcaagtgcagtttctttcaaaactcattaccatgtagatacaaatgacttcctcctccagtataacagtcttctggtgcctcaagctacatcttaccaacatgtggcacacctaccccatgaaaccaaccttccagttggaaataaatccaattcagatgaatcagatgactatcaacgcagtcttgcagaagagcgcaggaggagaaggatgatatccaacagggaatctgcccgacgatcacggatgaggaagcagaaacagctaagtgagctctgggcacaggttgtccacctccgcagcactaatcgtcagctccttgatcagctgaaccatgtcatcagggattgcgatcgtgttacccacgaaaactgccagctgagagatgaacaagccaaactgcagaagcagcttgagaagacccctgtagagaacacggagagtaccttcatgggtcctgacaattgaggcgtccagacttaaggtgtccagcattacaagactagatgccataatatgagaacttaaaccaagaggctttctcgttttattctaagatttttcatttttgtatctttgctctatgttggacatcaatgttagaatttagtggcaatttctccagtttcttttcatcatcatctgttagatatcatgaaacgatttaagtaccaaggaactagtagaaaaaaattacttttggagaacatgatgatatcatcatttggagtatggccataaaatgaagtttttggaacagttaataataagctaaaacagacaagccacataatttcataaatggagcatgccactagacaaggaccttcacaagaaagaatgactaagatagtgagaaaataaatccaagaatcccctataataatagaaattcctatgcaataacctcaagggagacgcattagtcataaatatctttttggctattggaaaatgaatggaacaagaaaaggataatcttttactgtattcttgttatgtgctatggtggattgaggcaaagagcaaagctgcaggccaattggatgtctttggtagacccgtccgaccataacaattcttaattccttaccaacagtgataaaatggtggtgactcttgcgtattcaagaaaaaaatggcagtgaaattgtttctcagaacactaatatgaagtggtaaccaacataggtcagataaatatctgtatgcactgctcaaatatagcaaaagctgttgtagtcggtagtggagcatttccataaaaggaatagagagattggtgtaaaggcactactaagtgcaaaattagttacctatctttctccacaaaattgattgcccacgcagtttttgtctctgaattggtgacattgctaatccaaacctgccaaatctgagaaaaacaatcagtgtacatgactgagctcctatcataagttcactatggtaatggagctccatttgcaagacacattctctcaaaacttggagatcactctactagccttttcaaaaatctggaatcaactagaatatcgatacatattgtaacatagataaaatctcataaacaaagagtaaatgtgatctattgggttccagttcaagcgaactagaaaatcaagatcgcttgaattttcagtaaggcatgtacaacatttccataggcagcagtatgaaaagaacaaaatagaatatacagtgccaaaagtactgaacggatcccaagtctacctgcttctagcctctaggtaaggtgaattattattgacatgttgacattttcttcttctatgtataactgtttgtaaaacatagggtactgactggtggaatcaatcaaaataattaacaatatcttttacgagcaataagagttgattttctccagacaaatcttccaatctttcaaacaatattccatccattctagcttggactccatttagggaagtgacatcctggagcactcccttcactgccctgtcaactccaagcaatgaactgccaattcctgacaagatctctggtaatgttggtgagggctttgagatctcaactagctggacctgcattgttcagcacaaaataagcatctggaaagtgaactctctattatgtatttccaccaagtcatctcacaaaatttgcaagttagaattattctctgaaaggtaaaaactgcaaactagcaaagcttgttatgaacccaaaatgcaatagctgaatgaaacatgcaaaacactatttgtcgatagggaactgcccttggttactccatgcgttaagctaatatagctcctctagtattctccctaaaaaaactgctattggttactccatcagaatgtgaagcattgaaaaggtaataaatagttcaaaccccatcaaagattcaaatgcaactctgctatcaattatggtcaggtaactctgctatcaattagtcccttaataaagcctaaatgcacattaatgacgcatatatgcatgagaggagttcattcaataaatatgcatttcctatagcaaacctctaaccttcctatcatggggtatattggctttctgttttgcaatagcaagagcttgtgagaatccacccagtgaatcaaccaatcctcttgaagctgcatcttggccactccacacccgaccttgtgcaacagtctccatctgatcaacctggtggtgcaagaactcatcacaagcttgaagagatatgagatgctcaacatctgaggtcaatccttacattcattgagcgtgacatggctgctttatctcgaaacaatgcataagcattttgtgctgacttttcaaaaagttctgcctcatctggtctgtaagaaaatgttacactcctcaaaaacatgcgaagcatataaactaactggtaagaaaataatattccatcttaaatgacactccatgtggtgggaaataaacatgaaaatgctggataggaaactattttctccaaaaacttaggtaacatgacaacaacatttaaacttcttatcaaaatgcaacttacagttaaaatctcttcttgcacctaaacacccatagacagaataaagttcttgtttttcatacttcccataaaacagtgtggcttacctgtcagttctaagacgaaagatgatctagtctattaaatatctcacagttatttaaaggataacagctgagctaataaactacttcctccatcccaaaatgttaagtattttttaggttggcacaggcattaaggaagtaggtggaaatgatgaatgttgtgattggtagagaagagaaagtaggtgaagaaattggttgtaattggttgagagaagggggtaggtgaagaaatagcttcattttagacaggctactgtgctagaaatagctacattttggaacataggtggtacattttaggagtccatatttacagattgataatttgtcattaaatataatgatggcaaactaaacaaaaattgataagaagcagtatgtgcaatttatgataaattttaaatgataaaaccagttctggtctgtcaaaaaatcacacacatttttatcaagaacataaaagtgaaaacatactgaataattgcagatcatcatacgacaattggcatgcactgctttcatgtcatccagctccagcaacattgtgctaagttaccttaaagggcgttgatcagcagcattaagctctgcatatctacccttagatataatttctttattgaagtcaatccgctcatatagcttttgcaggatgaacttccctgatccaagtacaccaatatgaaaataagaattactccacacggtcaaagaaacatgtcattttggacatcgacacggtctccaaatgcaactttaacaactaatttctattgcagtatatttgtataaccaataaaattataatattatgaaagtaagtactttccgagataaatctacgcatatgattttcatgatccaatctaaaattttcaaaaatatattgatgttcaaagtattagaagttcaacttgaaagatgtcgaaaacaacaggttttcatgaatcatgaccagagggagtaacatgcaatggcagctcaattcattgtcttgactccaaaatagtatagtggatctaaagttcagatttgagatcattacaaaagtgccaacttattagtcaacgtgcaataaattgttactctagtacaaccacaaaattacaagataataaagatcacctgttacaactccaattgatcctgttagcgtgagtttttcagcaacaatgaccggtgcagccattgccatgtagtacccaccacttgcagcaacatcagacattgaagcaaccacaggcttggtgtcagctaggagtcgaatttcccgccacatcctagttcaaataacaacaaccaatacataacgaaactctgctgctaataaattggtgaaatctgaagcataacttacagatcagaagcaagagcatcaccaccagggctgtctatacggaggataacagctttatacttttctgactctggcaaggataaggaactcttcgttacaaatagcaagtagaattcactgttaaatgggtgaactaacagaaatttgcactatatacacatgctaaataagctttagcaggtacttctatggtccataatctatccaacaaaagagagaaatttcatctcatctaagaaatattaataaaacagggaactgaatccggtaaggatgatcagatttattatatctgtgtaaaaagatttggcctcttgtctttttagtgtttcctttcttttttaggtttactttattctaaaaattcatcagcacaagttttgagggataacatcacaagattaggaacatgtttggtttgctcagagcttgaaaaatcatattgcccaccattgttgaattcagcctgtgccacacttgtggctctgccacagagcttaaccaaagctttactaaagtctacatagcgcctccaggaaagtgttaagtctaccacgcatcccaactccatcggtgaaagccatgggactccagattggcccacattgcgcctttgccaccatactcggttgtgctactcttactcaactaccacatgcagcctgcattaggtcctcacattgcactggtgatggcaatattggacacctaggactgggccaagtagcctcacttgatggaaacaaatagcatggactcagtggcatggttcagtagcagcttcacgacaactggtgaaaccaagaggacatgagactgatggggatcccatggaaagtaatgtaagagtagattctaaagataagaataaagtctgttagaagctactatcttgttggaggcaagctcgttttatgcctattagatgtgatgagccatgcaaggaagacatggcatggccatcattaccaaccgaaacttttattatctatagttttcaagagaagttataagaattaatcactcaactttgtaacaacattatggctctgcaaaaactggagctaaacagtgaaccagaaaggtgagtggagatataaggctcttagtgttttccctttgaacccatgctctttgtctaagcgagcatttaaatgttctgtctccaaatgaactttattagcaaaagtaagtcaagtgaaaatagcacactatgagaattttggtcgacatttcattggtttatatttgaagattgtttgatctcatacgagagagagagagtacaaactgacaacttataaaattacctctaacagtacgtatcttctcgatcaactgctcagcaatgatgcctgaactaggaacactcaatgggctgcgagtacgtgttatgcttccagatgctctgatcactgcaatttgttcaccccctccttgtaacccaagagtccatttacttacacgtgaatatttactgcaaagagaatcaaagtcattttaaaaaatgtaacatagaactttacagtacaagaaaagaatatggcagcattcgttaagacaataagtaacaggagcagatttctagaccttgttagatctagtttggccagtttgctagagaggacctctgtttattgctatttttccatgaatgtgtatgacggtgtttattgtttagttttagtggaaaatggagaaaagaaataaagggcatgaaaattttctaaactatagttggtttctgttggggatcaatcacctcacaagtgagtcgctggtacttgcctgaaagtttctcatatattgcacaagctaagacttacaagggtatacatctccttctatacctatttgagtatgatgctacagtaaccgacctactacagtaccattgcgccgaacttttacagctcacattgaactagtctcctagctgtcctttggtaagccgtaagcattgtaccaattactataagacactagtaaaaacaggtaaagcaacagctacatgaagctactgaaagcttcatgctcgacatacaaaatccaaaatgactactactagtagtctagtactactacctgtcattgactaagcaggacataccttactagttaatctagttgacgcaaggactgtttgtaatttgctaacagtttccacccggttttccaaaagtttgatccaaattacctgtaatcaaccatacgcagacttttcttgtctttctgtgctactctctccttcaacattgccatgacctataggataagatgatgccaaaaaaagaacacaatagtagccactcaaaagacgaggaataaacatttcattatgtgaattaagttagataattaaaaatgcaaattttaaactatgttctcagtttattttggagtttgtttagaaagtttgggttcttttcaactcttaaggaacttgtactagatcccaaaaggtcgcaactgaaccttctcatccaaactgtccgttaaggtggaacacttgtctaaagagcaattctcattcttagggtagttgggggtttgtcccctcacctaccctttttttttcagctaaagaacttattagctgtgtgctgtgtggcagaggccgaggatgtaatacatttccaaaatcttaaaaaaaaagaacaattctcatcatttctcttcaggtacatgtagttatttttgtatccatggatcaagtactccctccgtcccaaattagttctctttagaattcaaactttgtcccaaaaaagttgtcacaatagagaactacatgtcccttcaatcacttctaatttaattttgggaaaatccgtttcatatcatcgaaagtttccaagtttagctttatagcatcgaaagtttgggtgcactttaataccactaaaaatttccaccgttactctttctaccactgccgtttacttccgtctagattttctcgtttctgtttaattttccgtagagaaggccaaacaaaatgactgtactacccttctttcacatagcagtttcctgggacgatcttttttctcgttctctttccataggcccatatgtggagggaaacagattgattttgctcgttgtttcaatcagcccgatctttgcgtacattcagatgggagaaaatcgtggctggagcgaggtcgttccgtcgttgtggaccttgtcgtcatggttatcggtgggggagaaactggaatatcttgtcgccggcgcggcggcaccgccgagcccgttttaatctgaggggattggatcattggagaacctgctaatagaatagataatgttgccggtgaccccggcgctgacaaaaggagctcaggaggggagcttcagtcgaatctctcgtcgtcgccgttgagattagatggacaacggagagggctcgccggcggggagccgaatcacaccgcggtgagcggcggccgggttcaagcttggtggcgggcggcgggatgtacatggcagagaggacaagctcggcagcaaggcggagatagagggaagagctcggcaggaaggcagagcagctcggcggcaggagggacatggcgccacttccgtgatggcggagatccaggaaagatgcaaggcaacgaaagagctgcctgctgcgtgcggagctggttgcctctacagggtaatttgtcatacttcacgtgagagattgaaatatggacggaaatgctacaagcagtaacggtggaaactttgaatggtattaaagtgcaccgtaaacttttgatggtacaaaactaaacttgaaaactttcgatggtataggaccaattttccctttaattttttctcttttctaccctcaaccatcctcccatatccaaccatacattatttaataaaggggactatggtcttttttagcaaactttaatccatgctaaacaacctagaacgacaactaatatgggacagaggcagtaatatgttgcatgcttatagcactgaaacttgacgattgaagcatcactttgattcccagtttgaccatggatgtgagcaaacgatgtagatgtagcaacttatataagataagttatttatgtaatttacttggtgccttagcaaaaagttaaaatgaatctgtacctcatcatcataaagtaaatctgttatccaaccttcttccttaagtctggcaacctgatagactcctgaattaatgaattcctcgatttcttcttttttcttccctacagaagaaaaaatatctaatgaaaacttatcctttaaaaaggtggagtatatctattttgaattaccatgtttggaagatattgtatccagccagtttccataaatattgtcgagcagtgtggctagcatctccctaacctcatttgacatgctcttccgtgcaagttggtctcccgcacttttgtaacgaccaattcgctgaatttctggttctatcccgactttctcaagaacaccttaccaattgagttcaaaagcattagatacccagaaaggaacttgctacattcaattagcttgattttgtggaacagcaatgaaagtgtatgatcaagcttactaaaattggttccaaggagaagtgaaactataaaaaatgcattgaacattacaatagaatgaagtacagtttctgtataaaataccataagaagacatataagtaagttcattaagtgtaagcaatcattggaatagctatgtagtttagttgcaccataacaatactagaaatcgtaaagttcctttctcctgctaaaaatgaaacataaaataagtttgtgtttaaccaataaccacatcgatgaaacataagttttgtgtcatcatagtacatgcaattacctctgagaaatgtttgctgaacagttagaccaaacaaagcaacataagcacttggcggtgcatacagctcaccacacgcacaagcaaggtagtactctttctccccacacacaggcatataaccaacaacaaatttacctacaaagtcatgcagcacctgctcatcatctgacaagtgacaagaagaacagagataagatactaaattcagctcagtttatagttttaccggacttcttgaaatcgacaatgtgtcttctgatctcatccaccttcccccacccacatctcagaggctctatgtgcagatagatccccgatattcgcgggtcatatgcagctttaacaaaattctcgcagatttgtggcaatgacagcccggaagagaagcgtgtcttcaactgatcggatatctgtggcagtaaacaaacacaataaaaaatccaaaatgggtcatgtcacaaaattgacaaatgttcaaaaattaaaacaagtcatcctaaaaactagcaacaggacgacaaccacgtctcagttaatcaagtaccagaaactatctctacaatccaagcctctatcaggatgaaacatttaaaattcacgtagtgagtaaatcggatatctatggtagagctagcggcacctcgccccgaagcttcatgttaaggacgctgcccttgcggacgcgcttccatggcggggccacgagcatgcgtagcttcacggcgagctgggtcccccacccgagctcctccacctcgaacgccgacgcagcggggggcggcggctcctgggcctcaccctcaccggcagccggagtcggctcctgctttgtggtgccgggggaggactcgatggcgcgggccgggacgcggagaggcgacgggagtaggattcggcgcgcggtggaggggaatgaggcggaggcggaggcggagtgtgggtgcttggagttggagggggaaaggaggaacgtggcggtggcggagaggtgggagcggtggtacggcgccgagcggaggacgagtagcctcgccattgttgtggaagcttcggggagcccgagacctcgtcggccgtcgcggtgtagggggggaatgaggggggtggagtggtgcgagggaaaaggagcgcggcggaaggggaaggaagattgaggcggggcgcggtggagtggactaggggtcaatggattgtggggtcgggagcggcggaggtgagggataggtcggggtcggttgattcggcgccacgttgagcgccaagggagatgacagggagaggacaccttttcgttgttcactgtgacgatagatgcctaaatcaattttaacaaattttgtatattgttaaattttgatattgtcaatgtgtgataatgttaaaatgtgtaagtggatgtttggttgttagtgaagtaaggaacggtttcctattcaaggtacattgtatttggtacattggtgcattagggattttcaagtagagggtcggtgagtgagggtttcatccataacagataactagcacacattttctcccttctgcgggaaaaaaaaagataaaagagtcggttcgggcgttgattcgccgttgctattagccggtctactcgtgcctactgcttactttctcgatctatcactttatcacatattgtcattcttaaggttagataagtttaactaatttagcagttgtttggtagtgggtttgtaaaaacagacgtggcaagtttttcttttgataaattatccgatatgctagtcacttaaaagagtacggtaagattctcttaaacttattgaagtatgggtaatgatttgattatctcaacttagtcaaggatgatgagatttattggtagatagtgataaaatatgcttgtgatcggttttttttatctttgccaagtttttgtgagagaaagattatataatattgattttttggcgacattattgttatcttgtcagaagtaaagaaaaacttgatagggttatttttgacaataaggtgaacccttcaaactagcacatggacgatgacagttgaactttttttttttgaaagatcggcagaggaaaaataaggcaataatcacaacgaaccacatgtaacataaattgtcaacatcaagtaaataatatcatgaatgcaaataaaagcatcaaactattgatttgatggcatgttggtacattggaataggctaaaggagaacatcgagtattcgatggtatgtttggaacatttgcaaactctatatactgatggatgtaatcgctctataaaaattaacttttagctataattctgaacataactagaaatgtttttttaagataaaggtacatgcattttcaatttaaccaagtaaaaactacatcagcctcagcctctaaatgattatgatggttagctttttgaaactctctcttttagacatattgcatgttacatgattaaccaagaaaccatctggtgatccatggtcttgatcggaagtgttggctgcagcagcgtagtcagccccaatccaaaccaaagagcttatttactacagctgtaatagggttacatggcttgctggctgcactaccgatcaggctccatatgtttagcgcttaaacaagtaccattctagttccatatattaattaaaaagttttataactattgaaatgatatttatataataggagaatattctcttgagtttaaaatcatttatctatttatacatattcaatatttttggtctatgttattattatttttactgtgttcttacctcatgtttcccaacccattttcctcattttctgcgcgcacacttttcaaaccgtaaaacggtgtgttttttaaaaaagtttctatttttttaaaaaatatattgatccttttttaaaaaataactaatactcccttcatttacttttcatagtcatatttcatcttaacatacagaccaaagataaataattctacttatcatccatttaaatatgctactcccttcgttctctaatatagcgtgtaactgctttccaccggattccctgatataaggcggggctactgtttgtgcatgcaagcattcatgatggcgttatgccaggcgggcaaagcgcgtgagataatgcatgtgcatgctggtcatcggcaaagaaaccttaaattaaggagcaaatataataatgagctataagagcaagtttaataatatagccaactgctaactccaaatcgccaattcatataatagttagttactatactattaatatctggtcctacctatcatacacacgttacgttttggactccgtattgcagctggctacagatctatagcccgctgctcttctctctcttcatttatctctttaaaatatgtttatagctggcttatagcctgctattgtacctgctctaagcctactataaccttatgtggatgagagaggtagtaaaaaattaaggatgtaggctctcatgcaagagttagcttatcacaaactccaagacaaatacattaaggcaaaatttggtacaggacacgcaaaaatcgtgtaattgtctgaggaacacacgtaactatgtccgtgggcactaaaaaattgtgtaattgaccataggacacctaaaatttccggaatgaaagtggtgagatttttttataaaatgcctagattgcccttgcgggtcaccatctctcaatctgattttccttatgaaatggagtagtagtaattgtatcgctggaattggagtagtactggtattactactgcacatgtactatgaggcgcactgtgccagcgtcgtctacactgtttacacgtgcttcgcggtggcgtcttctgctgtgcggctgccggacggcacggcgagccggccggcggcggggaggtcgtcctcgtgcgcctccgcgggacgctccatggcgcgcaccagctgcacgaacaacggccagtggtccggcgagaagaacgatccgcgcccatccgctggtatatgaagtggcacggtcgtatgcgctcgtcggcgagcgacgtgccagggggagtcgtcgcagtcgcactccacgacgagcgacacgctctcgctggcgaggtgcacgccgtgctctgcgcaggcggcctcgacctgggcgaggacctccaccgccgcggacccgtctatgcctgatgcgatcaccgtgcaccagtagccgccatgaagccccgcggtggcctccgctgggcgcaactgcaggagcagcaccttcgcggacagctcgacaggctcactgtcgaacaccttgcatgccgtgggcaggacgcagtcaccgtgcgctgtcgccgaaggcgaagccgcctcctcctcctccgccgccgccgccgccatcgcaatgttagtgttaggtttggggattctgggtgggtgggggtggcgacgaatacgactaggttgggttggttcaaccggacccagtcgggagcgtggggggcaatcggggcatttgaaaaaaaatctcatctttttcatcccgaaaataataaaataatccgtccagtgtcctatggccaattagataatcttttagtgttcacgagcagtgtcatgtttttgcgatgtcccttagctaattacacgatttttacgtgtcttgtagcaaattttgccatacattaaatatataagtgagagatagagagaggaggagaaaattacagccaaccttataactaatatattatatatgttggctttaagatgggctaatagtaggaagttgactatattattatctttgctcttagagcacccgcaatggtaaagtaaggtgctatatataaaacatgtatatctcagtaatagactcgattaatagtaaaccacctcaatggtatgtctacatcggtatctatagctctctaatgcattgcctcgtttttctctatagactatctccaggttagtagatagctttgctctctctcttcatgtaatctcttcaaagtaggaaaatatgctgacatgcatctcttgcagagagcctatagataaccattgcgggtgcccttgcacgttgaaaggagagaattaatcagtgcaattgctattaaaactgttttattggtctttgtgttggcaacaggtacgccctatattaaggaacggagagattaatagttattcctcgtaaataagcgatccattaatatttacatttctcgatgctcatatagccaaacttgtgtgaaacaatggagagtcacgtattaaatccgagaaagtcattaagaggatagattattggattgaaatacacctatcaaaaataaaattttcagatttgaaaatatatctatcaaaaatagttggaacgagtagttaattaagcatgtattaaaaggaccgttcagtgcgcgttacggttgggaccggttgggaacagcctctagcgaacacagcaaaccgtgtcaccgagaaaggtccccgaagttgaaaaaagtacttttggtcgccgcgccaccaacttccgcggttgggctgagccgccaccccacacccacacaccggggccggggccgactcgtcgagcgcaaccgcatctcctcgcttcgctccttctcggcttctcctcctcccccctctctctccagtgggggacgagcggcgagccggccatgggcgtcccgccggtcgactgggaggcggagagctacccggcctactcggacttcgcggcgatccccttattcgccgtcttcctcttcgccgtccgttatctcctcgaccgcttcgtcttcgaggttgtgatggttttcacggttctttttccccaccacgcccattttcgtattgttactggagtggtgagatggagagaggggtggggggcttttctgacaagtgttacgcggttgtgttttgctctaatcaactattatagtttagtaaggattgctataatgaagatttttaaccaatacagttgaatgctgtccagtgcgattatcgatagtgccattgttgtctgcttttcacagagttaaattcaaggtggtatttggaacaggaagattgctctacgaaattttaggacttagactgatatttcttttctcccaaacatttgttttatgggagattatgaagtatggactattcctgactcagcattttgtccatagtggttagccaggagactgattttcgagaaggatgagaagcttgatcttgcgacgcatgcagggaggataaagataagaaaatttaaagaatcagcttggaagtgcatatatttcctttctgcggaacttttggccctgtctgttacctacaaagagtcctggttcactagcacaaaaaatttctgggttggacctggagaccaggtctggccagatcaaagaattaagtaagatacacatgctccctcccatgtttgttatgtttttttgtctacacgaagtttatctgccttcctggtctctcaccacacacatatcaccccaagttattactaaatcattttttttgtgcagatttaaactcaaattggtgtacatgtatgctgctggtttttatacatactctatatttgctcttcaattctgggaaataaagcgctcagattttggtatttcaatggttcatcatgtagtatctgttattctcatagcattgtcttacatattcaggtatattagctatctatgaatttgtcaagcttatctatgttgaaatcaatgtctagtttccctctggtatgtcgttctaatgctgtgaacacttaacgagtcactacagagcccttcttcttggccttattcagtgttgagaattggagttgctaggttgcaagaacaaatgcatgtctatgttagggtttaggcaattgggcacacccgtatacaaaatgcacacatgtacctccaacaaatgagggtagatcatctgctttgttatttaccatgcaaatatcttttgttttagagttcaatacgtcttagtaatagtatatcttatattttatttttttgacctgatatcttatgttttacttcatccgtcccataatgtaagcatttttgaggtgggtgcgggtattaagagagtaggtggaaatgattggaggaatgttgtgattggttgagaagagaaagtaggtgaagaaattaaatagagaatggttgtgattggttgagaggagggggtaggtggagaaatagcttcattttgggacaagctactgtgctaaaaatatctaagttttgggattgaggtagtattatttattgtatcatgtttttatgcttggtaaatgctccaccatccctattagtttttgttggaacatgtttttttctatattaccaaattaatttactttacttaagcagatttgctcgtgtgggttcaattgtccttgccatccatgatgcaagtgacgtattcctggaattggggaagatttctaagtacagtggctaccagttgcttgctgatgtttcatttcttatctttgtctgttcttgggcagtccttcgcctgatatattatccattctggattctctggagcacaaggtagatactacatgttagtgtgttcatatacggagttctatactttagcctttagggggattctataatatcgctaaagcttatgcgtttcttctaaaatttcagctatgaagttgttccgatgttggacaagaagaagcataagtttgatggtccactacactattatgtattcaactgtcttctcttctccctccttgttctaaacatatattggtgggtcttaatgtatcgaatgctcgtggagcaaatactgtctaaagggcatgttggggatgatgtccgatctggtaggttctctcccccttttattcccccttagatcaatttaatgcaaggatggattttgataatgaattttttgaagttaaccattggttaaatgaatatatcatcatgtggggtcatctgttatacatcacataatataggtccaatatttatgtatgtatcatgaattcatggtgttcactatctcctgcctttctgtagattctgaaggtgaagaagaacatgaggattgatttatatgtgtagatcctgaaggagcaaaggattggtctgtttaactgcttcaccatgacattatgctgaaatattacattgctgtgctgtgtcttcaaatcgcagttctgttttacttggctcttcataggtacacagtacattagtgcacttatctggatgaacatcatagatagatgtcacctgggcattgttcatttatgtaaacttatgtcaagtcaattcctttgagtttcggtcttgcgaccatactccccatactgtatagtatctacgcagtacttaatggaaaaacatgagttgtgcacatatctgcctctaccagctcagtccatgcaacctttcaatcaagttgttcatgatagcactgcagtatattgcatttgataaccttgcttagagctaaagtgcaggttgaccttttacatatgatagtacagaagcatataacaatgtgtcccctttacaaaggtattttatatttctttactgcatttaccaagatattacattcaggtgtcctatacacgtttgtagttaacattgtaaaatataatcataatttctgtcaatcatctttgagataggaagcactaactgcctgttatgttaatagtccacataagttaaaatttcttcggaattatatagcattcagtggcagatccaccatggggtctctggggtcttgaggccccactacctgtattgtaaccatgggagaccccatgaagaccccactaacattttctgtcatacatctattagaggggtctataattttgtatagtttgttcagaccctcctattaatctttcctggatccgcagcattctaatctttgatcatcttctgcggattttatcttctgccagaacaaccattagttgtatctcaaagtttcaattctttatagctttgctatttcagaatcttggaatttatcatcactaggcacaagaacaatatacattccctagctatagtttgatggcacccatggcaatgtcatgttcacaatttattttgtgtaactgtacgcaccatgaatagttgtttattaaaacattatggcgtggctgttatatgaaagtaacataaggagttgttcaaagattccagtacaatctgataaaccatagtgaaaattggtcttgctttgttacatgactaatcagtatacacgacattctctttctttcctcaatcattccgatcatttatttattagtttagggggataagttgtaaggtgatcttgccattgattctagtggttggaattttagttcagttatactaaattaccaaatgaatacagtgaggagccttttttagtgagaagggcaggagccttttttttaaaaaagaatcaatattcaactactagttgatttgaaatgattggaagtcagaatcgcacaatttatggtcaaagctttaagcaagatggattggttgattaaggtaaggaagcaaaaattgtcatattggtttctgaactatttcaatgtcctgttggtttcttccttttatcctaggtcaatgttagttcctgtggaacctttgcatgtatttgcacacttttaatttttttagccaaagtacctttagtttttggttaatacatattttgaaggaactgcctagttatactcaatcaataaatatatgttaagactatacctgatagtgatatttaatcactagaagtttgtgtccatgttatgtatgcatctaatttttcacaccatcagcccgtcccgatatgcctgttattgcttttggagtcagtacaagtgtacaacctctgtcatcagaacctctgctgagcaggagccaagagttcacttcatcttcctcgcttccatgggcagcttctgcctaattaaaccagaggcaactgggagtggtagcacaggtactcttggtgcctctgagcaagtggatttgcagagtgaacctctgcatcacaggtagtacacagtgcaactgcatctgcacagcatgccaacactgaggcctgaggggtgcactcattggctttgcagacggcgatgacgagatgtgacatgatcagcagaatgaacctagtagttgaatcagcgatgacatccgtcgcatggcccgacccccatggaaagcctctccctccagcttcctgctcaaaaaggttactgctgaaattacaattcatgagcatataaattttgcaacttgcaattcataacatagagaggtcttagcaaagattgaagcttgtgtttaatgtgtccctattgatgtgggtatgcatcttcttctgttccctctcactcccgcttttgaagtttttcttgaactcacttgggagtgtgactgggaattcaatgttggaagttcagtagggagtactactaagagagtggcgaacccgtagtgacacgtggcgtcattcttggcggtgaggagtgctgtgtgccaatcttgtggttttccgtagatgttgtttctatgctgcttgtcttgatggcaatcctcaagtgcaacgccattttctgataaagatttgttgcaatttggcacacctagaacaaaagggaacaatgctttctggtaagttggaaccatttgttttaccaatgtcaaaatttagtaaaccagtttggccgatttacttataaggtgttaaattctgttgaatttgagtatgctcaatacagagatgatgtcatttccaaaaaattgtctactcatcctttcctcatgcatttcacaacttaatgtttgtgccactagatgtctagattagatatattgaactaactttgatcagagacagctttccctgagctattagcttatcaaggtggtctgagctattataaaccgcccctgatggattataacgagtatgttggttaggcacagatacaaagaggctatgaaaccaagagattgttagcatcatgtgtcggcacatcagaggtagtttgaaggtaagaatgcattttgtttatcctattgtatttgatgcagatggttgtcagtgttatttgatgcattttcaagctttgcatcaatgcacaaaaatgtcattgccaagtctttataatccaatgacaacagtttcttttttaactaacactagctaaggcaaaaggtacaagggaggaaaaaagcataaacaaaatgttacatcttgaaaaatattgctctgcaaacttattctaccaatagttacagaatctgtaaaagtagaaatatcctatgcctaggaagtgctcttcttttaatctttgtacagctgatctgatacctgcttcgatttgtgattttgcattggcatgcagttgcttgctttaaatttttttttttggctatttttccattgtacagtggtgtctcttgctgtacagatcctgctgcaaacaactaatgatggtttgccttccactatttgttatcgtgtcatctcggcccagagagctcgactgcctggaccagcaatgacgagtcatccgtcaggtcagagtagcagcgaccgaaggtgaactcaggcactttgaacttgtgtgagtcagcgcgctgggatgcttcccaccgctctgccagtccatctccctccagcatcctgaccacctctgacatcctgggcctgtgaccagggagatattgggtgcacagcagtgccacctgcaccatctcctccagctcgacacggtcgtagttgcttctcaggcccttgtcgacaagcacgtcgagcttcttctcctggtgcatcttcttcacctgaacacaagccaatgtcaaggcaagagacaagatttggtagacagatatgctagccttattctagcgataattttcccatgctccaaactctttggaaatggtaatgaacttacccagtccagcatggctcccttctgatttgatgacttcccaaattcaagtgcagtttgaccagtgatcaattcaagcagcagaattccaaaaccaaagacgtcggtcttctcagatgactggccggtggagaggtattccggggcaatgtgcccaacggtacccctgacagctgtggtgacatgtgagtcacgatgatctaggagcttggcaagcccaaaatctccaacaatggcttcacagtagtcatcaagcaatatgttggctgcctttacgtccctatgaataatcttggggtcacactgctcgtgcaggtacagtaggcctcttgctgcaccgagtgctatcctctgtctggtgatccagtccaatggtggcttccctataattagtcacgtgagaacaaaattggttatatgggaatcatattcttttttaaaaaagttttggccaatgaaaacgatatagaaatgaaaggattaaataagaagctctcttgtcaagaactgaggaacaattcattactatttcatttagctattttatgatggaattactgtttgatttataattttggaattcatgaaccatcttgaaatcatgatgttcttacctttcagacgcaatgcgacactcccatttgacatgtatggatataccagaagcctctcagtagcagtcatgcagaacccataaagcctgaggaggttccggtgaagcgccaagctgatcatctcaacttcagtctgaaactgtgcctgcccgcctgcagcattaccatctttcagcctcttgacagctacaacagttccatctggtagctttccccggtaaacgtttccaaagccgccttttcctaagatgttcttattgctgaagttctctgttgcaacctgaagctctctgaactgaaacctcttcacatttcctaggttgacattctctgtgtgttgctctgcaatagccaatgcgttacaatgaaaacaaccatcgcatgccagtatgcccccaagtttgacgagcattgaggcattatggatagtagtttggctttttgcttaccatcaacatcaaaaagaatttgatggtttcgcctatgcctccaccagaacagcaatcccataacagggataaggaagctgatgcagccaattgtagaaccaaatgcaattgcaaccttgtggcttttagattttgctggcatcagagtacctattgatagaaggccattagagcaattgctatctacatggccaatgcaaatttcaatttgcaaggtgatttatgcataccctgtgtattattcaggctgtaggacatcggcattggtaaagttccataacaatcatgttccgtacccgcagcacagatcaacggattccccactatactgcaacagataagcaaaattttgaggcaaattttgttttccttggaggtagtttacaacaaatttaacctgtagctgttttttgaggtgttagactgcatacttacttgaacgttcttgccaaagaaccaggtactggaccactcagattattatacgaaaggtccctgaaaaatgcaagtccacaataagaaccggcacagcgcacatacaacataggacagatatcaccaaacagaaaaacaagcaaaggatactcacaggaaaacaagctgtgataaattagctgatgatgaagggtatgcaccagacagggtgttgttgttgagcctcctggtagcagcaaaatggaaaagaataagaagagttacaccaattgtgacttctgagaggacaagttacaaatggggaatctcattcaaggctaccagaacagaacagaactgcactgcacttacaagtactggaggctttcgaggtggcctactgagtttgggattccaccagagaagtggttactggagagatcaagtgttttgagttttgttagcctgccaatctcttctggaattggaccattgatgttgttgttctgcagaagactacaaacaagacatattaggatctcttcccactcaagaaacataatggaagcagaatctacagcgatgatcgcaaaggctaatcacgacaggtaaaacttacactatctcaagattggtcaagttgcctatgcttgcggagagcaggccagaaagattctggcttggagcctccctatcaaattcagacaagcaaacaaataatggtaggtcagcaagtcaaaggaaacttgtcaagatatgttggggttgagtaaaaatatgatactctagatggcttgcttacaggccagtgacaaggttctcaggtgagcaagtgaccatggtccagctgcaaggatccacggagtcttggtcccagttcttgagcacaccgtgaggatccttgagggaagtcttgatcatcatgagagcttgcactggagatgagattatgacacgcacaagcacaaatcagtgctagagaaacaactaaagaagaaccacgggagagttcttcatatgggagtacaaaacaaggtagcaagcaccaatgcagccaaaaaacaaacgaaaaccaaaaaaagagttcttgatttgaggaaggaatattaaccttcatagtttacacccttgggagagaggagggcacttgcaagcctgcaagggaaggagaaggaggcaagcaacaccagtgagtaaaccgcaagagccacctccattgccatggaagggcggaagcaggagaggaagggctaatcgcttgtggtggtgtgttcaaacatggaggaagggtgaggccaaggaaaagaagcatgcagccttctcttctcacaattgccagaggcctctgagccgctgtcagtagcaaatgacacaaaagaagatgcttgtgttctggccgcaagcaaaagcgcaaaaggaggggcgagagggaacaaacatgcctgccacctgaccctgcttgcaatagaaaactggaacaaatgagaggggggcattccttttctgtgttcttggggtttgagcctgtggaaaatgaaaaaaaaaatcaggttatgaaaaacagtgaatgtgttgttaactcaaaagggtctaggctaatctaagcctaaagcagcagattggtattgatcccatccaagatagacatcagctttattggagtatgggtatgggtgtgtgcagtgcagcagtggcagtaacactgtcacaggtcacaacagcacctttgagggattcttgtaagaaaagaattctccaaggtaggggcagttggacaattagctaggtaagtgtgcgagaattattttgggggcaataaacaaagcagcaaagtatctttgatgggaagtagggcggataatgacagggaggaagtgctctcacctgacctgaagtggaggcactgagaggaactcgacaggagaattttggccatcatgcattgtggatgaagaatcaaaatcaaattaaaagcaacgtaattctgtcctgtggctctgttctcactgtagcaacaaccttggttcttacacatcacattgtatcaattcagttggcatcaaacaataccatgctgatactcatacatacttccaattaagagcagacttttctgaggaaatattagtgtattgaaccagaggccatccatactttcctttgtcatgtcatggtacttatagtttagaagtggatagtatgttgtatatatagaagagtgaggttcaagaaaaccaagatttgagtgttgttaacttaggatattgctgttagtctgatgctccacgaggccatcaaccttcttgatctgcagacgggatggaatggcatgcccatgttgcttttccttttaggagggagaaatcattgtggctaccttgcatgaaagatgtgacatctcttttcagtgaaatgagtgatgctttggtgcctttgccgccccgcaccttttctcttgccctttgctatccttgctttgctgtgtgtatcagtgtgtgtgtgtgtgtgtgtgtgtgtgaaagggccatgttgtggttgtactacgaaaatactaccgtatagatgtggtataaaaggtgtgaaaatgtatggcagaggtccctcaaaaggtgacctgcaggtttatccgtatagacagcattacaattccagcttgcttgctcgcttgaaagttgaaagttgatgcacgagcagagtagaacatgcctgatcaagctcaaagcattaggtatatagatcataacagtgcttcacttgtcttaatctcaacttcctactgaagacggcatcatgtcatcattagctttgttgtttaaactcaatggcggaaaggcttaattagtggcaatagaaatcatgaacacagctgatctttaaaggtcaagaagggtactttcaaacaaaacggctgaaccaaccaacgttcacaatcatgcaggcatgcagctgcagtgcacaccacacagtaacaagcaggatagagaacagtagaagatctttgcatcccactgctccacacatattgccaacgtcacaggcttcttggttttgaccaggtgatctcaaccttcaagtactgtgaccaacacaatcagcaaaagatgctgctgatcttctgtacgccgtatatgctccatcgttcagtgcctttgaccagcaaggccactgttgtacagtacagacgctccggtaaatggaaaaaacaacatcacaagccatatctggtgctattccaatctggcaagatgagtagctgaccatgatcacttgcaattgcagctggaccttggatgcaaactactatcaccaaatatgactagggggtgtttgggagttagggactaaactttagtccctctcacaaaagcataagtccctcagtttagcccctctcttccaaacaggccctagctaacctagctttcattatctaaaaaaaaaagctaacctagcttttatcttggcaaagtcccaaacaaactcacccctagaacatatactgtgtactctcttcgtcctaaaaaatggcggagttagaatttaaacataaatatgggcctaagaattttgtaaaaggcctaattacctaatagattagataattatatatataaagtatgttgttggagggggggcaggccattggtcctccccctgtttcacccaaaatatagctatatttctagtttaaatttgaagatgctacaaccataagtctgaacatgtttgtgtagcgtaatttggtcctccataacaaaagggcgagtgaactcgaaccactatgccaaactaggccatttgccattttggatggaccctttccccttgtccgagctgaaggcatggtcatcccaagagaatctgcatattccacaggcttggccatgcattagaatcctaaacccactccgttatttgggtggagttgggaagggcagttggaaccttgagagctgtgcctgatcatacctgtgaaatggtagttctcactgtcctacgggctacagcttccactgttccacatgctcgctatcatgccttcactttcctatcatctcaatgcaatccctaccttgactgcataggacaagataggaagcttttgtttaggttatgttagagtgtatcattaagaacttaagacagaatctaatcatcctaccatgacaattggatcaatgtaaactaattatgtcctatcctagctaatcctaagcataaactacatatcattgagtttggcaaacgtattacttgtttcatatatgatcagcttggaacacaatttgtggcatccatatatgatcatatggatgctacaaactgattatgtcctatcttatccaatcctaactacggagtacatatcatgttagtaggagtatttactaacattgtgctgcaagtcttgcacggtatgacaagggaagggatagttgcagaaccttccctgtgtgctttgtcttgtatctgccacaagattccaaacaaaggcggccaaatttccccgtcagatgaaatgccagatggatcagatccaatgccaaaacctgagttgctccccgagtcactggctggctctctggcgctctgcgaagtgcgaccagctctgaattctgaagcatcgctgcatcggtggccgcatggctgcacctcggtggccaaactgcacggatgtaccatgccaatgctgcacaattccggtggtccaaaacacctcatgacaagaagccacgaagacgagcgctttggccatcaggcaatcagaaacaagaatcttttgccgcatttttcaggatcgaccaattggaaaaatggatacaggatatgaacataaccacgagcaacttaacacacaacacctcatgactttggtgagttttctgatctggggtgcccaggtattgcatatctgggccttgggacagggacttcttactggagagtaaatgatcagctcaccaggtttcattacaattgactagcttatgctaatcaacagagaaacagcatgatccgacaggggtaaactagtagagcaaccttcatgttcacataatacatatagaaagatgtgagcagccatggtgcctgggtttctatcactaatttactatggccctggggctgggcgttgtactcagaacattgaagatgtaacctctgcaacttcagctacaacatggtcgtagtctgacttcagtttctccttcacctcttcattgatctcccccttggcaggcttggtcataaccaggacgcaacaggtaggcctcttagtagtcccggcagtagcaagatcctgtacagaggaacaatcccattatgtaacttagggtaacatctacctcaacggctcaatcactccagcctgccacaatataagtgaaatcacaagttaggatctgtttggataggaaggattgggatcaaattctgaaacttcggaaccaatccctcatccaaagttccaaaccactcctcacagccaattggtggtacctattttccttcccagtatggtatacgggcagttatataggtaattgataataaaattgacagcagaaaaagtatagattcctatccacttctaattatctcaacttcagtcttgttacatgattggatatatttcaggtttgcagacttctgaagaaaatgttacgtgcccatctgaacgatgcaaaagagtgaaacccgagcaattcaaatttgatgcatcttccttccagctcagagtacttattaaaaaaaaaagatgagaagtttcaaataatttttagattatttacaagtggaaaacatctgataaccaatatgtgaaagaaccaaacaaataaaccaaagttgtacaattgtacaacatatcatcgtagcttgaagacatgaactggtagacgtttggctttcttaggtgataaatacagtagcaggtagcaacaatgtcactatctaatgtcatcttataagatttggtgtaataatgaaatgataatactactgggtgattgacagtgcattgaacctacatgaggcaggaaaaatatgcaacacacctcttttgatggcacatatatgtaaggaatattagcttcctcacaaagtattggaacatgtgtaatcacatcgataggagaaatattcccagcaattacacacaacctacaaagaccaaacccagttgtcagtgacattatgcaagacaaaccactgagaatgatatataaacagcacagctgataaaacatcaaagtatgcaaacaatctatcaatggtcataactccataccacaacaaaatggataaacccatgatcaaaaagactaacataatacgtttttttagtaaacatgttacaacataatgtattcctcaatgtcaatgagacatggcgcggaccatctaatggaaatgatatcctattcgctgattgctatgaccatcggttacatcacgaaaagcaagtgcacaattggacatagctcaaagatcacagcccaatgtccttcaagtgaactaagatactcttggttaacacaattgtacatagcaaaaccaaccaattactggttactaaacagcaagaaaaaaaattacatgctagagaagttataaacaacaagaaaaaaaaattgtttcaggttataagactttctagcattgcccacattcatataaatgttaatgaatctaggcgcgcgcgcgcgcacgtgtgtgtatatatatatatatatatatatatatatatatatgaatgtggccaatatgctagaaagtggaggaagtacatgctagagaagaagagatattaagtcctaaccctttgttcccacgacggatgctcttgaccacctccttgactccccgcttcaggcacttggcctccgatgctgggaaagaaaacataggaacgaccaaaagcatgataaaaaaaccttaaactgcaaaagaaaacaacagagattggaatttggcggcccgaaattaaaaaaaaaaagtctctcaggaacctcgccggacgagcttgagggttcgcttgcagagcttcttgccggcgagaggcttcgcgatgggcgcgagcgccgttggggccttcttcttctccacctccgtgttgctccccatcgccgcgccgccgccgactcgtgtgttcgcgcgccttttggttggttctggagtttttagggcttttggactcgagacgaaagctgtgtcacctatggttagtgactgaaatgtgggaccacctccatctaggcccacctgtcagaagagctataaattaatttttgagaaagaaaattcccccaaaccctacaccctcctcgtttctcccaggcttcagagtcgccgccgccaaatcgccgcccaccaccggtcgcccgccgccgccgccgccggttgcccgcttcgccctagcgggctcgccctcgccaacggcaccgcgacgcttgcctcgccatcgctggcaccgcctcgcctctgaccgcgagctcttcgacggcgtcagacagcgccacgaccactccccgcaggctgcggcgctgcgcccaccactccccgcggcctctcacggagtgaggcctatccgcggcctttctcgtgtcggctccgtgagacctatccgcggcctttctcgtgtcggcttgattgttcttaattcgttggcatgggcaaatccaaaggtgcgtcctctcttccattatgcatcccacagtttctctgttagattcgttcgaaatgagagacgaaagtaaaagcttgttctactacagacaagaaggcctcacgggaagctaaagcggataagaaattagtgcttggagtgaagaggaaggacttgaagagaaagaaggacaggactttgaatggtcctgttgagaatgaggttgctgctgaacatggcaccgcagaaggtattaacatttttttttctctcgctatgtactcccaattttatttgaatcgcgtcgtttaattagtaatcaatgatgaaacctatagtagtggtctagtagctcaaattatcaccttgattacctgcaaaggtggaagcaatgatgtagctaagatcggcaaacctattaaggaaatgggagtgtcactgtggttgctgatttgttagccgtgccgtagcatgagaatcagataattctctatgaattccttattgtattatttttagctctttatgttgtttattagggatatgtttacattgcaggacaaaagcatgaaatttagttatgttttctgcatagtgttttacctgttcatctttggttgctagataaaggacttgtacgaaagaagaaggttgtagcgatgaaacagaagaagcaaatgaaactaaagagcagtcagactgattctgatgacatgttggaactcttgacgagtaaaaaggatgagacaaagttgaagaacaagaagaagagcaaaaagaatctcaaagaaggcagtaatcctgttgaggagcatcaaagtttgtctgacagaattaatgcaggaacgcctaagctgaagaaggaccggaggagctctgatgagcccaataatgcagatgaagtcttgcatgggaatcaagatgaagaaactccaactggtagtgtatcttgtttgctactccattaccattttcttgtaacgaactatattcctaactccttcactatgccactatctctttttggattttgtaaactactcatcatttccttagttaaacagtatatctggatttattttgtgcagcccgtgttaaccaactcacagcagagagtggagatatggatataggggagcctgaagaagtgaagaggggaaataaaagcaagaccagtagggactttatacttgtatcaaatcgaagttattctgaagtatttgaaaaatattctgtttagacttgttgacagtaattgatctattgactgtagagaaaacaaagaaatcagggaaaagcagcaaaaaggataagcatgaatccagcagagagaacaagttggacaggcatggtgaagttgatactgcaaatgtcgatgagattcaatctgttgatgaagattgttccagaggaatgaaaagtaattgctttagttttcaatcttgatcactgatataataaacggttgtcccatgctgactttatccatggagtttgtttggtggaaaagtaaatttcacaaaaagacaacaaaaaattcaatgtatccaaaaaacaacttaatcaaatatcctttgaaaccaagtaacttaattagtggaaagaatctgtaggaaattctgttcaggcactgagttcatagtaaaattgataagtgtacctgaagatcagcttgctggttcctccaattggagcggtcctggggtccaaccaatctgctcttgtttgatatagttatgctccattgtatatgtttcaaactggtgcatttaaagtgcaaaactgacctgtgattgtttgatgtcttaacagaatgggtcctagagtacaaacagaagaggcccggcttgaaagtgttgcagcaaagaatagatgagtttataactgctcatgaggaacaagaagagcaggtgtgtactcttcctcctcttccttcctcctgttgaagaatcaaaatgacacttcaatttccttattacaagtttcttctctggaaaacaactggaaacattcagtctagtatggtacaaacctagttttgtgaaaattatacctgtttcttgaagtgttgagtgactgttgcagtgttcacactatttgcgtatctggtttttaactattcttgaggtagtgcaagacttcttctggatgttgggtcttcttctgaaaaaagtacttttgttgccaaaatgatctttagtttggttgttgcctgacacttgcttgatttattcaggagaggaaagagagggaagcacgcgctgctgaggatggatggacagttgtggttcatcataagggtaggaaaaagaccacagatactgaaactggaacagctgttggctctgtatctctagctgcaatgcaggagaaaatggctaataagaaacccaaggaagttgatatgaatttctacagatttcaaaagcgagaagctcacatcagtggtatgtatatgctctttcgaagctttctattatggagtatcttttatgcagttttatctactctcagtgctattagtcaaaatatgttcatcactgtgctgttttagttatagcatgtacatctgggacttcaaacattattcagttcaactgctcatgaccatttgggtgctctgttagaaaatctcattcaaacagtgggtcaccatatagattcgcgtctaggttgtaattacaggtccacaatatttttgtccttcctcttctgtgtaccaagtgaagtaaacccattttgtatatggctatgtaagaagtattttttttcttttgcgagatggttatcataagggcatgctgcccttcctcccatagtttgatagcaggagataaagggcagcaaatttgtttcaattactgtggtgcatgatgtattttctgcaactttttagggtcgcaaaatggcaaaagctgcctggagctaactcccaactctctgtttcttgcgcagaactcgcgatgctgcagagcaagtttgagcaggacaagaaaaggatacagcagcttcgtgctcaacggaaattcaagccatactaatgctgcccactttggatatctatcctcagagacgcagtgctgctaccctgttgaaggccatacgtttcattccttcttggcagcaaatgtttgctctgttggataacatttttggatctttacttcttaatgaaccgaaacaatttcagccctgcatttgcagcgcagatgtattggtttaaaatcatgccatgaatccatgatgccatctggtgcctttcatggatgttctcctgttaagttgtactccctccgtcccctaatataagatattttgatattttacttgtattgtttgatcactcgtcttatttaaaaaatttatgctaatataaaaaacgaaaagttatgtttaaagtactttggataataaagtaagtcacaaataaaatgaataatatttcaaaattttttaaataagataaatggttaaacagtgtaagtaaaatgttaaaatctcttatattagataatggagggagtatcttttctgctgaatccccgactgagcctactcgacccgaggtcttggtctctgcctgctcagttctagccctccatgtgagctctagtcaaatcgtgaccaagtgatttgcaagaaccatctgagcgagcaactcccgcgatttcagcccagcgccatggatcgattttcttctctggctctgtcgccttgaaccccaaaccgccaaaccgagacgacgcgacgcagctgcaaattccacgagagatccccaaaatcagcagcgaaactccctgcagccgcgagtgccaaaccgcccgggggctgagctgagctgagctgaacctcagcttagccatggggcggttctccaatggcgtcctgggcgccctgagcttcgccgccctcctcgcctccgtgccgctcatcggcgcgggcgcctacctcctcgaccacccggccagcgagtgccagcgccttgtgcgggtgcccgccgtggcgctcggcagcgcggcgctcctcctctccctcatggcgatcgccggagttacctgctgccgcggcgcggcgctcctctgggcctacgcgtccgccatgttcctgctcatcgtcggcatgttcttcgtcaccgccttcgtgttcgtcgtcaccaacaggggcgtcgccaccgccgtgtccggcaccggctacggggactaccgggtcagggactactcggagtggctgcgtgccaggatcgaggattacgagacgtggcaccggatcgagagctgcatggccgacgcggccgtgtgcggcggccctctcgccgggatcaaccccggcgagttctaccgtctgcatctgccgctaatccaggtttgcatggatccattagcttgttgcattttgcattgcatgcctcatgcacggacccactcgccagagaccgaataatacctgttccattcaacgcatcacttcagtttttaattctttctcgttccatgtgagctaatactaccagtaaaaatcaactaatcaatggccttttaccctttttataaaatttaaaaaggaaataggtattaccttgttcgttttcatttactccctctgttccgctcaccgcggttaaacttgacggaatctttaaaactaatctttgacatatgctataatatttgtagcaacaaaattataataatctaaaagtaaatttaaatgataatctaatgaaatgcgtgcgtgccttggtgagcggtaccgagggagtattcaagattgaatgttgcaatgagtttcttaatttctgagattttacaaaagatgtatgcatatgaatcgatttatcagtagcaatacaactatacaagtactactactatcagttaccaaaaaacactatcaagtgtgtcacgtaggtcctgtgtcacgtaggtcctgtttagttccaaggtttttttatttccaaaccttcaactttccatcacatcaaatatttcatacacacaacttttttatcatatcgtaccaattttaaccaaacttccaaacttcagtgtgaactaaacacaaccgtagtatctgactacctctgtgacgtgacaaccgtgcagtccggctgctgcaagccgccagtgtactgcgggtacgagcgcgtgaacgagacgttctggatagcgccggcgcggggcctggacgcggcggacgtcgactgcctggagtggagcaacgaccaggccgtgctgtgcttccgctgcaacgcctgcaaggccagtgcgctggacaccgtcaggcgaaactggagggccgtggccgtgctcaacgtcgccgtcctcgccatcctcatgctcgcctactccctcgcctgctgctccgtgcgggatcgcagccggtactactgatcgatcacccggccgtcggctagcttgggtttctgctgtgctgtctagttcctttccttgtctctagatcagaagttttgtaaattttgttctgcaaatgaatcgggtcatgtctttctgaccatgtttggtggatttgttctgatcgaattaatgtgatcagcagttgtgaccggatatttttcaagcagagtcaggttgggcaagaaagaacccatcttagcagtgccggctatatccatcaagacatcaaagctaaaactttggaacaaccaaggttgtttagctttggagagtgctctgccttctgcaaactgtgtggaaactctcgaactacggaggagatccaattcaccaacgtttttctattgtgttatctctgaccgctggaaattcaatttgttttgttcgttactctgaaacaaccaagttgtttttttaagagtaaagtgcaggggcggtccctaaacttgtagggctatgtcatctaggtcccaaacttagaaaacacatttttaggtccctaaacttgcttagccgtacatcacctgtccaaatcgtatttgacccgatctgctcaccaacgtggactgccagcttggaggggcgaggtcagctggggtgtcaaatatgtaaagaaccccctattccctcatcccagaaatccaatcgaatcccctgtccccatttttttccccaccatcctgagtgacgaaatccctagcaagctcttcttcaatttgccacccccttcttcgattcactaacggcgctgtggcgacgtcaagatcgactggagctgcatgcagttcatcgtgtcctgccgtggctacagcgccaacaacaaccccatcggtgtgtgaccgtcgtgtcctactgaaaaggcaatggattagttctgaggaggccaataagatggttgccgtggcaaaagaagcagttgcgattgagaattcacaagttgtcaatgaacaagaatcggttgttacgaaccaggtaaataaatcagtcatttacaacaaatttattttgatgcatgtcttatgaaatacattgactattatatgtaggatgtcatagaagaacaattgctgcttcccaatcttcatctcaatcactgtcacaactaggaagcactgtgctcagtcagatggctaatcaagtaatcattttgttaattacttctcacacatttgctgaccatttagctcttaatgatctactaaagattttctctattttgtagccaagtcagagttcttagctctctcagcagcaatgccccttgtcagatcctaagttcatcatgtctaacagaccagcatcaagacctactcctcttacaaccagcaccaagatagggaaggccacaacgctctaagaaaaagaagagtacaactggaaacaaaaaatctggacctgctgcattaaagaagtctagtgttgtggctggaactgggtgacaattttagtctggagcggcacatgatacatgtagttagttcattttcgggatattttgttgcctcaaaatctggcatgaattttgttgacagcaatctaggatgtgcatagtcaatggatgctatattacctacctgccatggtggtttaactgatagttggacaatatcagtgctacctgggttcaaagtcaatcgatgcattttgtaatactttccgtacttaaacaatctgaaatggatgttatgtctcattgttgaatgtgtctcaatctgtgtttccaatgtgtgcctcaatttgaaattgtgtgtcgatctgtttcagtactgaattttgtagaattcaatttcattcatacataaaaacacccatttcatggctcacaaacatgtcaaattaacaaaaaaaaagaccatttcattcatcagatagcattttcagtacatttcagacaattgcacattttcaactagccctgaaggtagcatacatcttgttcaccacgacaaatacacaacaagctactacacattttagtaacaggacaacatccctaccaatgtcttgttcatcttcctaacaagttgctctgcagcatattcatgtccctctgaaccctgctcgaccaatgcatatctctacacatgcacaacaggagctggacactgcgcatggacaccagaagctgcaagatgtcctgtattcgtcaaatactccttatattgatcctcccaataccaaaacatacatccacttccatctcgctgataaaacttgcacatgtaaactcaaaatgcttgcaagacaccaatgctctgcaacaggagagaagaaataacctaatgtaaaagatgctgcctttattctcagatgtattagaagcaattaatcaatgggatttcatgtaaccacaccagccatcggcgcagtaattgtaggcgacggtgccgagcttggtgtcgtcgagctcctagtggatccaacaacggccacacaccgacagggttgtttttggtgctgtagccacggtaggacacgacgaactgcgcacagctccagttgatcttgacatcgccatagcgccgctagggaatcagaaaagagggtgtcgaattgaagaagagcttgctagggatttcgtcgctcaagatggtggggaaaaatggggacaagggattcgatttgatttctgagatgagggaatagggggttctttgcatatttgacaccctagctgtccccgcccctccacgctggccgtccacgttggcgagcagatcgggtcaaatacgatttggacaagtgatgtacggctaagcaagtttagggacccaaaaatgtgttttctaagtttggggacttagatgacatagctctacaagtttagggaccgcccatgcactttactcttttttttaatgatggatagaaatccgatctctatatcaacagacgaatacaaacaactaaaattacaaacggggtacttaaactaaacatctcacaataggggaactaaagaaacaagaaaaagctaacagatcaaaaaagaaagctagaagaccaagcttcaaaacctcttctgtgcctttacttcaaacttgctacattcttactactccgtccaaaaagagaaaacgaattcctagctacgaacctggacacacatggattggtcttttttttttgggatggagggggtatatatcaacaactcatcacatcgctcatttaatcggtcttgagaagcacttgatctcacacaaaccgtaagtattagagatccatatccatattatagattgtatatctgtttttattggtatttgttaccatgtacatctcctctaattaatctattgtaacttcgtagtacaccggctatatctatatttcaatccgctctccttttaggtgtgaggtattcttctaatctatctctctacatggtataacgagcctaggttttctcttccgttgccctaccgtgccaccgactcttggtcacacccaccagcacgctctccgcgccatctccctctccgcgctaattcctgcacccatgattccctcacatcaatgaattcctacaaattttaaaagtgagaagttcacatcagcggtatgtacatgcactttcaaagttttcttattatggagtttcttttatgcagttttaggtttttagctactctcagtgctgttagttataaatgctcataatacatcgttgttccgtttttgttataacacatggacataacattatccagttcaactgctcatggctattttggtgctagttagtacgtttcactcaaacatcaaagtaaaagtaatatttttagggactaggatatgtttcgtccggtattaagttgctatatttaaggacgaagagaccatgtttaaatttaaagcttctaatataaacttttttagtatgaatattaaactttgagctttattttctcataaaatatgttcttattagctataatactagtagtgtcaaagtactttcaaacatgaatcactacgagttgttctaaataagaattgcatgtcaacaatccggtaggaagtccaaaacatatgagtttctacttttataatttaaggtgacaccacactttctccatgtcaatgcattagttaccacgctctttgctcggctcatatctaccttggcgcccaaagggtcaagtggtcaacgggccccatcgatctggttgttacccggatttatatcatctacctttaacagcgtcaaagtttgctgatggccatattgagtgtccattgttgaaccaatgctacaattagctaacatacaaatataccataactaaatcgtatatcgttgttactattctacggaatgtggcaaataaaacataatatccgcatataggaattgaaatatgactacatgaaagcacattctttagtattatcacagcagacgacacttacacagtatatcaaactttctcgctaaaaaccaattaagttttttttacccacaaagttaggaatgcccttgtctgtactttaaaacactgattacatcaacgcgcggaagaccattatgaatcgagaaccttcgctgagtccatgataggagtgcattctttccttagcaaaaaaaaaaaaaggaaaaaaagaaaaagaaaaagaaaaacgccaggtgattggattatcgttctgtctaatcgtggacattggttgggagatcaacgctctggattacctacggcaaactttgccctaggccctagcagtacaaaaaggcagaagtccacccgtctcctgttctccctccgccgtcgcgtcacccgcgccgatcccccatctccatctcctcgctagttcgcccgccgcgccgccttgccttcgccgatttccatccatccattccgcgatgagagcttccgcctccggtgagcacccgtgccgacccacgcagatcctctctctctcgggtttgcctcaaccctatggtagatctggaagcttagggttttctctccgtctttttaccttggttttactaataatagtcagctcctcccctcccttcttgctgagtgggttgctcgtgacggcgccctgagctccgtgctgctggaggtggtccgctgatgactccagatcttggcctagttccttttgttgaatttgggactcgcttccatccgaatattttgagcgcaaattttttttgggaggaatttcaattttgcatatgatatattgttgctagatactcaccccgtttcatattacaagttgttgtgactttttgcaagtttctagagaaatgtagctactcttacaacaccagattagtttcatcaaacctaacattgaatatattttgatatgtttgtttggtgttaaaagtattgctatgtttttatgtttataatttgatcaaacttaaataaaagtttgtctaagaaaaaggtccaacgactaataatatgaaaagcgtctgataatatgaaatgactgataatatgaaatggagggaggacgtcgtagctagtgaacgtcaaccagacaccgtattggaaaccaattacatctaataaaatacatgaaagctgaatactttcttgataccagattgagccacatcagccagaaatacaggtggcatttgatcgccttcctcaccaactcgaacctcatcgctactctgtccgtctccttgctgcagcccacgaccaccaaagtaccctctccaacttgggtggaagctgaaagtcagaaacccctcctcctctctggtggtagcgatgcttccgcaaagccagagcagctcactgcaacgcctcaaccatgtcgagcaggtaatctcccatccctcgctgggacgcccatcttcccccttttggtgccctggactgtctccttgcagggattcctggatcttgatgtggtgaggtgttttgtgtgtgcagcggatagtccagctgatgcaactggcgggggcggtcatggaggagcttgggaactcgcagggtccccgccccgagaaagtcgttgcccactgccgcgagtacatgctcaccatcaaggtactatcttgccctaagatctgaatgcttacctggaccttgccggcaaaacaactaagagacaaaacgaaaaaaaaaactgatttgattgtcgcataacgtcgggaggcagctgatttcctattttattgcgtgcatgcatgcatatatttaatgcggggagattgagcagaggttagttaaaccctgattcctttcttacagcgtgcatgcatgcatggatttaatgcccattgatttatgccaggttagttaatccacccgcaaaattaattaattggccatgcgtcatgggctgcaggcatgcatgcggcactgaaccggcgctgcagcattagggctagatggatgttaacaactgctcaatttatttcttccttggtatcgtgcacaaatgtaatacgatgttcaattgcgaatggagggagtagaaattatgttttagtgtgggtatttagctcctttgcttcgttagaagcatcttcgtgtatagtcctttgtcaggctgtcatttgcatgctcatggattaatctcccctatttatggaggaatggcatactctattaagcatcctgcatgctgctgcagattgcagaatgcaaaactaaaattcttagtattgtatctttcacaattgcacatcgttcccaccttttgtttcaagattttacaaggtgatgctcaacagggcagtagtttgaataagaatcaacttaattctgatttaccaataggagaataacagacatttcaaaactttttggtcccagaagttttttttaaaagaggagaataatagacatttcacagctttttggtcccagcagcttcaaaaaaagaagaagaagaagtatagtgccgtgcagcaataacaagctgtgccttagttgttaagggtgccagactggcagtgaacttctctctggcccatccaagttctttctactcatccgtcaaaatacaagtcaatttgtgtgataattgtattgttgtacatgttcttgtgcctctctttcactaacttttatttaagacacaatatgcattgtaaatcatacatggtagattcattgttattatggttggagcaggaaattcaaacgacattgcgtgaggaaatcaaaagtgcctgcgaatatcgcccatttgagaagtctgactacagtgcaaggattgctaatgagattagttgcaaaaaggtggaatatgtacttgagaagttggatgctatgcaaacaaacattgaaaaatgcaccagttaatttataaaaagctacctgtctacctactggtgagtgcaaatgcatcatgtcacttccccatttgaattccccatactcaatcttaccgtagatacatcatgctccattgtttctatgggatgtattgctcacatgacagtactagtcctctaaagaaatggtggtactggtgctgtagtgatcattgtttcgcgcatcagaacattatggttatttcgtatcggtccaagtttgaactgtgttatcacttagttctaagtttgctatagtattggagccattgtaattggaactggcaaatagttctaacttataagaacattagttactcacaagggcagcttttacagttctagactctagatgtagttactacaattctacatgagttgcagtagtatatgatgtttttttttggcagatatcccttctttttaactcccaagactgatcaacaagttaatgatccatatgtgtcaagtgtcgactatgtttgagctttagacttcatgttagatcttagaagtaaggacattagttaccagactagagccccaaatgaaaatacctaataaactatttttttcaaactgatatacgtgtactattatcatctatgtcatgtctcataatcacttgatctacatggaggtcaagcttgtgccctagtttaaatatacttttttttggtttgcttattatatttctaataatgtattttttttatgtactcatacccttcaagaaaattgagatgtgtcatgtaagttaacacatgctggctgtatttctttcatttcagggttaacagtggcacaagtgtgactggagcggtttacaaaagaacatgactgtcggtggatctcaagttagcttgcaaacgcgcaaggcatcattcaactatgaaatgtaataatttatatttggtttacagtgctttggtctaggttgtgagaagcagctagtgagaatgacatctagttgatttcctagattatacaaatataccttctcataatatgaatgaaaaactgaattgtttagaggagcgtgttattctgaatctcttttcagacaggcctaggacatttaactatttatcacttttaaaatgtggtaattaatgatttgtcactcgctgtctattatatatgggccattgggccctgatatgtttatgacatgtaggttcagtggcaaatcttttatcactactcgtaagagttacaaatagttaattattccctcaaaaacttccattccctgaaggggagagagcgctaaacctattgtaggccatggacagtccgtggctgctccggccactacttcccttctgagcacgctgctccagcttctccgggaggagctcgctgccgtccgtggcccagcgagtgccgatggcggtggttgcggcgaagggttgcaagtgcggatcttttagtggaggacaacgactgggaggagtccatcttccggcggttccggcaggaggtgatgacggccggcgcgctcaggagatcaaacgccgccgccggtacgacttgcgagagcaagatggacgggccgcgaggccggccgccgcaggtaaaaacctcccctcctcgcagcagcagaccattaatatcatctgtgaaaatgttcctttgtgatactggtgttttcataggtgattcttgaaattgatatacctgcatgagcttgtccaggagttcatatatttctgttgataaatattggtcgtgcagttcagaatttcagactgttcaaaagtcggtatttaatttcatgagactatagttattaataaacctaccgttcatgagactataggtgtttttttttataaaactgcaataataacaaatgattttattagagaattactacttaaacccttgtatgtgtataacaagtaggcccaacatgcaacaagatgagtattcatctcagcataacaggtggaagttgcagctttatgataaaagcatatactgttgttgtagttatctgaaatgtttagttaaagttgcgcaaattgatagttttgacaaaatagttaaaatgctcttaaatttctctttctttttctccttttcaaaatcaactaatcaatggccctttgctcttttctaaaaaaaaggaaaataaatataccttcttttcattatggaagattgtatgttgcaaaatgagtttgttaatttacgaggttttacctaaggaatttacatgcatttgcatccatttctgaatatgctgaactcactcattcatttatcagtagcaatacaagcatcacttataaaaaaaaactatcagtgtgtcacgtaccgctcgcgatcctcatatgcatgttcgcctactccctcgcctgctgcgccatgcggaaaaacagccggcactactgatcagtgatcacctagtgattctgctgcctgttcctttccttgtctgtagatcagaagctgtgtagattttgttctgcaaatggaacgatcatgtctggtgagttcattcttcatcctgattgaatatgatctgcaaatgtaaccggatatttcaagcagagaaagagcccagacatcaagctgaactttggaacaaccaaggtttagctttgacaagtgccctccattctgcaagctgtggaaactctcgaggaagctacggaggagatccaattcactgactctattttgtttatctttgatcgctggaaatcccatttattttgttggttactatggtctgaattctgaaacgattgagctcctgcagagtgcagggcccccttgttttccagtttccacggcgatgatgcgtaggaatgtaaaccagacttttgggacccagtttactgaatttggcactgcgccctgtgtttctgctatctattcctttccttgtctctagatcagaggttgtgtgaattttgttctgcaaatgaaatgatcatgtctttctgatcgtgtttggtagattattcagatcgaatataatcagaaacttaatcggatagtaaaaacagagtttggttggggggaaaaaaatcttggcatgtctggctaccatcaagcacaaagttaaatttcggagcaaacaaactccagtttttactagtgctctgcattctgcgaacgtggaaaccaaggaagctacgaagcagatcctattcaccaaccttcctattgtgtttttatctctgaccactgaaaattcgattgcttttgtctcaaactactccctgcaggctgcagcctgcagggtgccctggtttccacagcgatcatgcgtaggaatgtactaactcggattgtcgggacacaggtttgcacgttgtccaggaaactgaatttgacttgaatcaagttgtgcacaaaagaaaaatatgatggtatgattctgaaagcgacatcagattctgaatcgaacacggtagcgtgaacagttttgaggtcctaaacatctctgcaacctgccaatcatccggcagtttgcagcggtagggcttctgttaccaaactaatcagtaattagagtaggtacagtagaatgactcagcaggctcttaaaaaaaactacacatcagcaaaatattacgtggaaggaagagaatcaaggagagagagaataaagcgagcgactaatctgtcgccggcggtagcacggtttctcacgcgcatatcactcgcaagcagccagcacgggcgataggaaatagcttttgtgggcccgcaccaaccctacctgatcctgtgtgcgttttcccttccgctccccactccacacggtctttctggtgtctgatggcttgttcaaatggtcacagggatagtgttcactcttaatcctatatgattaatatgtgcatgaataattaattgtttaaatgataacgtgcagttaacatagtagcctattaattgtactagttgattttagtactaactataaaatgatatggaggtaattggagctgtcaacggcctacactattaaccttgctcttacggattactataatgtctccgttagtcgtgcaatgcagattttgacctccaccgccacgacgccaccaacaagctaaagcgaagagtaaaccatactactctgcaccctccatttctcctctcccaagagcacatctcctcgctctgatttcatcatgaaatcgcagaagaacaacctgcctcttcccaagcgatcggctgccatcgctgcgccgatcgctctcctcctagtggtcgggctcatctcgctctatgacttcaccttcgctgatcgctacccgaacattgacgccgcctcgtcatcgtcgtcgtcgtcgtcgtcgccgtctccggccaccgtgagtaagtgcaaccttacgcggggcgagtgggtgccggacggcgaggcgccgtactacacgaacctgacgtgcccgttcatcgacgaccaccagaactgcatgaagttcggcaagccgagcctcgagtacgtgagctggaggtggaagccggacgggtgcgagctcccccgcttcgacgccgcgaggttcttggaggccatgaggggcaaatccatggcgttcgtcggcgactcgctcgccaggaaccacttcaagtctttgctgtgcctcttgtccaaggtgcgtagatcagtcttggcttctctctgctcgatctgttggtgatgaaatggaggccgcttggttatgagtgtgtcgcaggtggcgcagccggtggagctcgtcggcgcggctccggagatcgacgtgacggggagggcggtccggcgagacttccggtacgacagccatggcttcacggcttcgctcttctggtcgcccttcctggtcaaggccaacctagcgaacgcgacgctcggcttgtgggacctccacctcgacacggcggacgcccggtgggcggcgcacgtcgccgagttcgactacgtcgtcctctcggacaccaactggttcctccgcccgtcggtgtactacgagggcgggcgcgccgtcggccgcaacggcgccgcccccgtcaccaacgcgaccgagatcgccgtgccccgcgccgtgcgcgccgcgttcagcacggcgctcggcgcgctcgccgcggcgccggggacattccgaggcaaggcgatcctccggtcggtcacccccgcgcacttcgagaacggcgagtggaacaccggcggcgactgcgtccgcacccgcccgttccggcgcgacgagcgcgccctgggcgccgtcgaggccgagtacctcgccgtgcaggtgacaagaacctcaacacacccttttgcattttccaagattcctatcgaactctccgatttagcaacagaaaatgttgatgcgatctgctcgtgccgcaggtcgacgcggtcagggaggcggaggcggcggtgaggaggaacggcggcgagctgcggctgctggacatcaccgaggcgatggacctgcggccggacgggcacccgagccggtacgggcacccgccgggcggcagcgtggagggcagcttcgttgtggattgcctgcattggtgcttgccggggccgattgacctgtggagcgagctgctgttccacatgctggttgatcaatagtactagtatatactcgttcaagtagatcatgagttcaattgctctaccaaaatttcaaagtgctgcttgtggaatgcaattggtgcattatacctggaagatcatttatgtgaaatctggaaaactgtactgttctgtaaattgagaaaggctaatagattgattttttttagatgatagatagaaacaagactttgtttcaatagaagctacaaccccttgttacatcgtccctgacataaagccaaatatgatactaccttcgtcccatttaagtgttaagtgtagttgtgggtttccgtgtccaatatttggctctccgtcttatttaaaaattgtatgaaaaaattaaaaaaaaataagtaacacataaagtactttttatgttttatcatctaattacaataaaactaccaatcattaaaaaaattcaaataaaacaaacggtcaaacgttggatacggagatccacaactgcacttacaatgtgacgaattgagtaatatctaacaaataataaagaaaagataaatttaagacccaccaacaaaaaaaagggaagagatacaattattcatatagcaatcctattagtaaatctccatccaaagttcacgaatatttacatgaccattgtcttcaagttccacttgcaggattgacgaattctgttttcatcatgtctttgtagcttacctaaactgaagccaaattgtcctgaaaagtacttgtatatgatttctggcatgcaagattgatttttttttcctaaagtgatattgcacttgctaaactcaattgatcgatttaagtttgtttgccttttgaaaaaaaaacagagagagagagagagggcagatgcacattgttccaaacaaacactggggtcgttgacactcctattttatgagggacattaggtcaagcttcctgttcttctaaaagaaaaatggaaactatgtcaaactgttaatcttgttgacttgatttaaatgaatactcctattttctgtctcgtgatttatgcatggtgaccatgtggagtggagatccatgactccaaacttcaattctccaaagtccaaccgagtaaccgacattgccattggcgtctggaggcacaaaactgggaactcaacgacgtggaacgtgtacgccatgatacctgccttgtggtaacaactccagaaatggaaccaaatgtccagatcgtgatcaggagctgagcagacactgcagatatcataattaatcgtaatgtcctttctataacataagaagtgcttacttaaagtgctttgagcttagcagttcagcaaacatctcgatgggggccctcctcattggattctaaacagatactctgtatatcatatgttagaattcagaatgtacttacgtcaaaaaaaaatcagaatgtaaagatattcagttaacagctatctgaagttctttttatgaataacttttaaacgagatgcagtattccagttctgctgcaattaatgtccaagatgctgcctgctcagcttaattctacatcttggatctgatcatcccttcagaattgataatccgtccaagcacactgggttgacttcgacgtgatactatggtttttgtttatgctgtcaggaggccaactgagcacattctgtaaaccaggagaaaatcgcatccagtgcacacatgctatcagcagtgaactagagagctcaattaatcttcttttatgagatgagatgatattggcgtttcaaccggaacgagtggacgtccaatcgagtgattaaaagagtttccgtttcaactgagaaaattggcatttctttttaccgaagaaagcttcttttgcgttctgttgcaggatgtctcaatcgaactttttgtacctcagtaaaacatcaaatgcggtgtgacatcaattcgcatccaaaattccaaatgcatgccacttgtacaatacaatgcgaaggaagagaaaactaagactaggtagatgtatcatgctcagttgcctaaccacggagcaagtggagcagcagctcgttccaggcgtcgacggggccaggcaagcaccagtggacgcagtcgatgccgaagccgaccttctcgtgcggccagtggccgtactgcccagggtgcccgtcgccgcgcatctgcatcatcccgctgacgtccatcagcaagaacctcccacccgccgccgccgccgccgcggcgcggaactcctccacctgcgcggcgtggaacgcggcctccgtctccgggaggcccgtctcgtcgctccgcatgggccgcgtcctcaggcagttcccgccgtcgtaccacttgccgttctcgtagtgcggcggcgccaccgtgcggacgatcaccgtgccgcggaacacggggtgctcgcgcagcgcgcggagcgcggtccggaacgacgcgcgcaccgcgtactccggcggcgccgtggcggcggtggcgttgggatcgccgccgtgacagtcgttgttgcacccgacgaggcggcctccctcgtagaggatggtggggcgggtgaaccacttggcgccgttgagcacgacgtagtcgtagccggcgacgccgcgcgaccactccgggtcggcctcgtcgaggaacacgttgtgcgggtccatgaactgcagcgcgccggcgcgcgtcaggttccaccgcaccaggaacggcgcccagaacacgcacacggtgaagttgtgcgcgcggtagtggtacttgcgcgtgcagtggatgcagtccttggcctcgatctccgtcgggaactccacctgctcggcgacgatgtgtcaagcaccgaaacgcgcgccgttacgtgcaacgtcgacggcggcgagtgtacaaacgcgcgtaccttggagaggaggcacatgagcgactgcatgtggttgcgcgcgacggagtcgccgacgaaggccatagacttgccgcgcacgaggcggaggaaggcggcggcgtcgaagcgggggaggtcgcagccgtggggacgccaccgccaccggaggatggactccagcccaggcttgccgtacttcatgcagtcctgccggctgtcgatcagcgggcacgtctcgttggtgtagtacggcgccgccgggtcgggcacccactcccccctcgcgacgtcgcacgccgcgcctcctccgccgccgctggcgtagcttgcacgggtcgacgacgatctcgccgacgtgccatcgatgtactggcgtgtgctcagcttcagcgaggagtagttgcagacggtgaaggcgacaaggaggaggaggatgaggagaagcccggtggtggaagccgctctccggacgagcaggttgttgtgcttcatttcgaccgttttgcgagagagggcaagatgagtgctctgctgatgttttcatcaacttttgggagttaagggacggtggattaatttgggatgtgctatctgttgctagctgcgtcgcgccaacgtgcacgaacatgtgctgcttgatccagcacgtagtcgccacaaactcagggagtcaactcaattctctgcatgaatgaatataacagaatactcccattgtttactgcactgtgcgcatggaggaaatgttcattgctcaccggtgattggtacggccaaacggcactcgtgctaccgagcggcggaggtcagggatcacggcggaggcgtctggtacggtaacaaaaagcgcggtgtagcgcaggaaccagcagtggcggatggtacgcggctggatggtttttttatccccaaagtcgtaaacaggccaagcgccagctgaacgcgaagaaaaacgaaagccgaaaggtagtgagcgggaacgcaccgagccagcgagtgctgcaaggctacatgtatgacgaagacatctataattcaactgcatggcaccggctgcaaggctccacgacatttaacttgactgtggggggaactttcccctcaacatatgttatactagccaagagtgatttatgagcgtccaggataacatccctgtccattgatatgcatttaccatattctgcgacagcgcaccgtgcttcatgagcttccgtgagaatatcattgtccattgataagcatttatcatattctgtgacacagcacctagtagctccatcagttgtatctagcgtaaggcactcaagtgatgatgtattctgaagaatatggcatgtaagttcaatcatgctcttcgcagagcagaaaccaatgatcttcacacttttgaggttcttatggtggtgttctgacatctccctcggatgaaagggttctttttttttgaacgaatcggcactagactgtgcccatttcattgaatatagtgggggaaaaaactgtacaaagctaaaaactttggaaatttacaaggggaaaggagaaaaaattaaatagattaagggattatctcagatagccttttcgcgccggctagagtccaggtcttggcctcctcctttatctttgtgcagagcgatagtatggagagttcgttgcgctggaaaattctttgatttctctctttccaaatctcccatgtcactagcaacagaagggtgcgatttccttttctcggtgtccctgggtgtgttgctattgcagtccaccagtcttggagcgacgcaggttgagcccaattgcctggtttgatgtgctcttgcgacgtccagcaagccagattctcccaaatcctcctagagtatctgcagtctactaggaggtggaataccgtttcccgggtatgtctacagagcgggcagaaagtgttgttcggccatccacgtgtagtcagcctgccagccgtccagactctgttttggatggccaaccatgcgaaaattttacatttgtttggtgcccatggtttccagatgattgcgtcatagtttgcattgatggatccgagaaactgcatcttataggcggagcttgttgtatactccccatgattggtgaacttccaagtgatttcatctgtcacgtctggactgagctgcacgctttggattatcgaccacagagtcactatttggtccagcagctcaactgttattgcatctggggaagagaaatttaggtcttgtacccagacgttatctgtgacgccttctttgaggcttctattctttcttttggatattgcatatacaagtggcatcacatccctcggccgccgcccttgcatccaagctgagttccagaagctagccgtttccccgtctcccacagttattgtcgttgccgccgcaaaaagagttttctctgtgttgtcacatgggttgtcccggccgatccaggttctctccggagctttccactcttgccacagccatctgatccgcaacgctctagcaaagttttctaaattcagaatgcccagaccaccatagacagtcggtgagcaggttcttttccaatttactttacattttcctctcgttagcttttccgatcctgcccagaggaagctctttctttgcttgtcaagcgtctccattgattccttggagacctttagtgcaataagaaggtagaccggctgtgatgatagcactgatttgactagtgtagttcgtccggcgagtcccaagtttctacctcgccaagctgccatttttccggccgatttgtcaaacaacagctgtaggtctgccttgcgcaatctgcccgttgttaggggaagtccaagatatttcataggtagggaagctcttgttgccggggtgttttgaagcacctcatccaagtccacgttttcacatctgatggccaccacttgtgttttttctatatttgcacgtaggccggttgcgaggccaaagcgatgtagaatagcagtgaaattctgcacttcggattttcctggtttaataaagactgctgcgtcatccgcgtagagggaagtacatagtgtcacagactttcctcgtagcttgcttagtagcttgagttctgtcgctttgctaagtagtctttgaagtgggtcaattgctaagatgaagagtagcggggatagggggtctccttgtcttaggccttgcccatgaattattttggtacccggtattccgtttaggagtatcttggagctagaagttgcgaacagagctgaaacccagtcacaaaaacgctgggggaagcctcaatgttgaagaagtgttaggaggtagtcccatcgtactgaatcgaaagcctttgagatatccagattgaatagaagcatcggccgcctggttcggtggtacttcctcaccatacttctgacatataggaaattatcatgtatgctccttccccgaatgaaagcgctttggcttgttgaaacaagtttgtgcatgagaggttgcagccgaagggccagtaattttgagaagatttttgcaaatccgtgtataaggcttattggcctgaaatcggagacttgttctgcaccatctttttttgggatgaggacgacgcttgccgagttgaggaggtttagatgattgcaccgatgattgtagatggcgttgaaagctgtcgtgacgtcgttttttatggtttcccagcatgctttgaagaaacacccggtaaaaccatcagggccaggtgctttgtctgtcggcatgtgacaaattgctctcttgatttcatccacggtgaaaggttcattgagcgaatttaaatccgttgtctctagccctagggattgccagtttagatctagttgtctttcttgcggcctccccatgaagagggaaaagtggtcgaaaatcgcttggcttttttcttcgtgcgtcactgcccacccgttttgtttgcggaggcgatgtatatgattcttccttcttgtggagtttactttgaggtggaaaaacttggtgtttgcgtcgcctgctcttatgttcgttattcgtgacgcttgtctctttctcgctctttcaatcaccgctaaacccaaaactctccttttcagggctgctcttaggttcccttcctccggcgaaagggtacgttgttcctgggccacatccagtcgtaggatgacatctagggccatatggtatttcagcttagtctgagagcacgtggttctcgcccaccgttttagttctttggccatatcccgtagtttatacgcaagccggtgcataggctcggtgtgattcgacggtttcccccaagcttgctctacgacctccttgaaaccaggtaactttatccagaaattctcgaatttgaaaggccgcggcttacgtgggcaggatgggtcggtgagcaacaacgggcagtgatcggaaggtcctgttgaaagagcgtgtaggatgtggcggtcgaaagataggtcccattcctcattgcaaaagaacctatcaagtctcatgagggttggtcgtcgtctttcattgctccacgtgaatttcctgttttggaggtggatctcctttagctcgcagcggttgagtgcagctctgaagcgattcattcggcctaaatttaggttgttgttgtttttatctcgtgcccgataaaccaagttgaaatctcctaggataagccatttgtttcccggggacggctttaaactccttatgtgacggaggaaggagtctttttctctgtgacgcgttgggccgtagaccgtggtgagcatgaagcttgttccgcagcgtaggacagttatattcgctgtcaacgagtaacgacctatgcgagtgctgtgcaccgagatcgccgtgctgttccacagaagtaggatgcctcccctagtgcccctggacggtttgaaagcgtaactgtctagcctgtaggctcctaagaaacgggctagctggtcatcaactgctcttagtttggtttcttggatgcagacgaggttgcaagatgtctctgcgattagctcgtttagtgcagtacactttgccggggagttaagcccccctcacattccagctaagtagttgtaggctttggcttgacattaggacatagatgctcagtggtggtctggtttacagcagggaagtggcgacgcatatgtgaggtggaagtcgtcgcaattttggtggtggtagccgcaggcagccgatcgccggtggcaggagttgcggcgggaagacgacgtcgtttacgcgaggtttgggtcgtcccaacagcagctatagtagccgacgaaggccaaacgtcggcagtagggcaagcagtcgtggtcggcttcaattcacagtgcaaacattcacaggagaggggagctaggcagtagtagttccgtaaacgtaaatcatccaaatgtagggcagcttcccacgcaggatacatgcgacgattagcaaaagctccatcagcagccgcagggtgcaaactatgagtctttgcacaagcaaaagggtacaaactttcatctggggtagaaatcatggggagaagacagagtactcagcagggcgcccaccctcccgttcatgccgctgtgtcggcaacctcctcgacaaggtcagcgacgccttcgccgacaacctccaggagcgtgttgtcgacgtgattggcttccatgattgcatcggcgtcgatgtcgaagatggacgtgagcgctgcgatcacgtgttgcggtagaggtccattgaacatggcgatgtagtcggagagcacctcgtcgagcgtcttgtcgtcatggagcatgccaagccgcttcaataacaccctcgtgcagcgttgcatagttggcattggcggctttgccgcgagtcttgcgctgcggcgacgctccatcccgtggccacctggcggcgccggtgctggcgctggggtcgcttgggtcgtcgtcagcgcaggggaggtcggccgtggcaaaacggcgcgcggcggggtggagaagaggctctccagcacttgcagcgtgttcttattcccggcatcttggtgttcatcttgttccgtcgttggcgcagctgtaatcagctgcggcggcgtcaccgtcttcgacgcaaccgccgtggcggctgcagtgttgcctcgctgatggtggccgtggtgtcggttcgagcctgttggccctgtggtggtgatgggtgggccgtatcatggcccgcttgcaagcctgtgaaagtagacatcggcagggcaggctgaaggtcttcatggcccatcaggcccattgcgtgacagctccctcctgtctgcagcccaaggtccgggaggaggccggcccatactggtgatggcccagcacactggaggggggatgttggaaatggcggcgttcgctcgccgacggcatgacccgcgtccgccatgagctaaagtgctgcaagtgcttcttccaccgcgccgatcgacgccctctcgtcatgaggcatcacttggcccgagtggcttggtgtagagtggatgccagcagggaagaggcagtgcttgagccggtcgaacacctgccggatcgggacgtcatggacgcgacttggccggcggtcggaccaggcttcttccccgccaggctgagaagcgtcatccaccgcagcggcgaaattgttcaccctgttcacaagcctttcccccgtctcacggaggttttcccttggtgcctgaagagggtgggagttaagggaaaacaacatcttaaaatcagttacctgcttcggagcgagcttgagaggcgggattgtagcaggcagggcgacagcagcctgcacgtgatgacgccggtcaccgcgacggtcgtcctctgcccagtcgcgccgacgcggcgaacgctcgcgcacgcgttggccatcaaggcccgagactttgcggctttctcgtcctcgccatgcctcgcggccccggccgcccctgccgtcgcggtcgtcgtcgtcgtcgcgccgtcgccaggcttggtccctgtcgtggtccgggtggtcgtcattatacgaccgcctgggacggctccggtcacgatcatctttggctcttcggcgacggtcgtcgcggtcgtcgatgcgctctggctcgcggccttgacgagtgcgtggtggaggcgggtggtgcgggaagttctcgaaggctcgcgttggtaccgggtccccgtcggccacgccgaggtgccactccggaaggcgccgcttggagggcgcgcatgcctcgttgccatcgaggtctaccgccaccgtcgtgtagtcgtggatctcctccaggtggatgtagacgcagaatttggcgccatgttgccagtgtgccggcggtctgtcggacaccaggatttgctctggtttggctccccgcgtcgagccggtaaaggttagccacatccgcttcgggatggagctcggattgccggtccaagcccacacatccaccgtgcgagtgtcgaccgggtggatcaggttggtctcgatctcctcgaggccacaggtgcgcgcgatgagccgctcgacgatgtcggcggatcaggcgtgccgcgggataccatctagacacaggcgcacgcgaaacatgagcgcgatgccgagggccgcactcaggctgcgccacttgatgaagtggagctcaataccgtttcgcttgacgaagcccttgcgcatagcttcatagcagtgactgctatgctcgaacttgatcaggaaggcttccgggtggtggcgcgtcaccgtgacctcccctcgccgaagacggaattcctcccgaaaagccgcctcaacatcttgcgccgttgtggaagccggtgcccgcatcgcccaggacaccaccgccgagctttcccattctttccgctcagcctccgtggcgaacggtgtcggaacgaagcagtggtcttcatccggccgggtcgccgggtctcccagtagagccatccgcgtgttgcaggacggcttgggtggaagaggtagctgcagaggtggtgtggaggcttggcggcacgacgtgttctgcggagactggcgtggttggcgtggtcgtgtagcccggggaagagacggggatggcgtagaagcctggcggtgcgacgtgttctgtggcgggggtggtgtagaagcttggcggcgcagcgctttctgtggagactggcgaggttggcgtggtcgcggttcacgccgggagcaggagtttgccttgtgccccgaacggaaacatctgaagcaacgaaccgggtccctgcagcgcgctgcgcggtgatcacgcgcaaggcagttgaagcattttccagccgttctctctctgaagaggcgcagcgatgccgatgcagcgggagccaacgagcgccttgaatgtgcgtcttgtcgcctggaagctggccgctgggactcgggtgaatgcggcgagcggcgccaccagtggcgtggcttgacttccttccactcgccattgaagcggcctggtctcgccgtaccatggatgcgacgcacgcccatttcctctccgggagtagccctgtaggcgcgacgctgaaaggtgctccaggctgggatagtaatggcggacttcaattttgggcgcggcggtggttggccgtgtggggatttgaaaacgggcaggccgtctcctttggcgggattgaaatccaacctgacagcatcagcgaaggagcgtggcatagcaggcgtgggcgaactccttggatccggggactccgagacgtgggagacatcgtcggcggagaaaggcacagcagatctggatggcggcggcggcggcgactccagccagaactgggggttccggcgtggggtggagcttcgtggggaaaggggtggtccagagaggggttgagaggggattactggtttgtggtggcggagcagcgtgggatgcgccggctggagtgctggccacgacggcggcagagacgccaaccgcatctggccagcaacgtcgagcggcggtcgagcaggctccaggggaagcgcgatggggcaagagaggcgtgggtggtgggcgtcggcgccggggtggctaccggcgcaggggggtggccgccggggccggagtggccgtcggtcggtgggaatcgcctgcccggtcgcctgttgactcagtcatccttcttgcaggaaattaactaggagtagctagttcagggattgagctggatgaaagggttctcaatgcgacgctgcgtcacctgcacaaaaccagttatgaagtcaatgctatattgttaacaacaacagatgaaaaccaagaaaattgaataaacgcatatcagcaagatgaaccatcacttacagacaacatgaatgtctccagttaaggagaagcttcaaaaaaggaaatcagaaataaataatcataggaaatagccagtgagataaaataaacatgcaagtgcttgagatggaggaatttgccgggcaccataggtgtcttgacaatctgcacatgagatgcctcatgttagttaaattcaggtgccataatatgcatagcattgctctaaaatataagtttcggagcatacttcattagatgctactgtaagtgtttcaacatttggcacaagggatggaagcttcgtacgagcataagaaacaaagttgccttgacgtaaacacatgattcgtagtttcttcactagcaatggattctcaaatgaagtccgtactagaaaaccagtaagataaaaatttgaaagatttggagcacagatctctatgactttcaaatatctgcattcagccacctcaagggagccaagctgccttagcatacaaggtactttcaagcaaattatctcagggcaatatgagagtttcagccactccaaagcgacgcatttggaaaggagctctaactcatctccagtaatccacacgaaagacagatgcaactgcgtcaattttatcaagcaaccaagaccaattgtaggacggaaggtgcagaccatgaggtgaagatatcgaaccgagtttccacctctttcaaataagagcgagcatgggaatttgtatcttacgcaaggaaacatcagggtgagttcctcaatccctggtgcaacagcaatctgaagccaggcttcgagacaacctaagtcgagatcgctaaaatggaggagttcaagctttagtgttttcacgccaatgcctgagtgattcagcagtatgcgctgtactatattgatgaagtctcttttagcgtcatcctttccagtaccatttataatcaagcccaacgtctccccagtgaagataaggttgggacgacatctccaggactgcaggaatatgtgcgaggcgcaagcagcacgagcagcatctcgcagtggcatcatggcatggatcagccgcaagatgtcctaaatgcacatcacaagaatatcttagcaaaggaataataaaaacaagtggtttattcaacgtggtcaaacaaatttgggccatacatatagagtgcaatactagaattccgttctttagggtgctctgagcaaaattgcactgatgtgatgtattacatacaagggcaggaagtagtgggtggattgtgcatgagcttttgctgaggttttttcttcgccacattagtgattagtgcttgtttgacatttcaggatggtgaaccctgtttgtttggcttgaaatggctagccgaaccctgtttgtttcctggcctagtaatataatgtaactcagtaaataggatagataatcactggcaaaaatgcagctgcacaactaactcaaactcaaccggtaatttatgtttggcaaagttaagcaaccaaaacatccctcagacatctttgacttcacctagaaacatgtatagagcattcgccgtgcttaattagttttgagttgatcagcagaaaagaatagtggtttgcaatcttattttgaattaggccggtggcaagcaacatgaatgatatatgtgcattcatgtgacgattaatttcattatactaatgtacaacatgaccgacaagtgaatcgataaagcgaataactgaaaaagatgcatgtgatttgtatagactggatattatcagcatttcatacctctggaaggtaaacgttttcttttagttggtagtgcagaccctttctttcagttttagccactgaagtaattgagccacctatggtaacatcacagattcaaagttacaatcagtagggacagtggtgaagaaattaaaaaagaaagaaagacaacacatgcacagttatatccagtttctttctgtcattcaacttctgcaaaaggagaacaaaaacagtatatatatttttttctgtcattcaacttctgtacaaataacaataacaaaaacagtaaataatttcagaaaccgtagacgagttgtttttgaaaagaaacagaggagatccctgcagagaaggctgggggaaggggagcaagatgcatacggcctcgtccaatttgtcggtggcagagctgccgctgtcgctcccgcttcccggacagaaagctcatcaacgccagatcccccatgggacacgatgatacctcggatagcgcaaatcggcggggacgaaatcgatcgagccttccgctcctctcctctctgaagtttagaatattaggcgcgagggagcccgtggatccgggcagagaggagactggagagcatggctgcacgaggtcgtttcggctccggccgccgcgccccgtctccgagtagtaaacatcaagcggagcggaggagatgccggcggcggctcgtcgggaatgcgaaaccgaccgggagactgggagaggtgatgggccgcaactggtgatccaacgcacggttacgggccgtgtagccgcacatctagtctaaaccgccacaaaaatagcccagcccactaagcttcatcattttcgattggaaaaagtacaccgaaggtccctcaacttgtcatcgggataaaaaaaacgtactcgaaccgcaaaaccagatatgcggggtcccttatctatacaaaccggtcacccgaggtcccagggtagtattgatgccggatttatcctacgtgacggctgagtcagtgtaggacccacatgggccccacgtgtcagcctgtctaggacatcctactctctctttcccctcttctctcccatcctcctcttctctctctagctctgggcaggacgggtggggaggaaagcaagacggcagtgggggggagcaaggcggcgacaacgatggtgacgcgggagcaagggaggggcgttggcggcggcgagggaagctccgcggcggtggggggagcaaggtggtggggaggagagcaaggggggtagcaaggcggcgacacggcggctgcaccaagtctgccgccctttctccccgatggccgccagcgggagaggagggaacggtgccaccactttcaccagcggccatagcgacggcttgccgacggccgcttgccgcggcaacgacgacgaccgtggatgcggcggcgccggcgctggtctcgacgtccttgctggccggcgttgctgccatggcttcagccaaggacggtgcggccggcgaggtcgaggtgggcccctaccattgccaccataggctagccggtgagaaggaggatgggacgcgtccgacgcccaccgcgcgcctctccccaccggtcgcccctccatggccgtctttagccgcgccgtcctcctctcctccgtcccagacttctctgccgccaccacactcgccggcgccggctctagatccgcgagctcgggacaccctcgtgatcccgccgccgagtcgtcggccgccccggcgacctcctccccacccaccccggcttgcccgagaccgagaggagagaagtgagagagagaagggagaggagggggaagaaagaggaggctgacgtggccacgctgatatgtggggcccacgtgggtcccacgctaactcagccgccatgtagaccaaaaccggggtcaaaaccatcgaagtatctcgggtgaccggttttgtatagttaagggaccccgtatatctggttttacggttcgagaatgttttttatcccgatgacattgaagggccttcggagtacttacctatatatacttgtaaaccaaaatttaaattctatctaatacttaatgtttaaattgattctgtggattttcatcgtagtgtttttacaatttgttttttatgttgctaacgtcacgtatttatccacaaattctagcaaatctgttttttttaactagcatggtggcccacgcagattgcacggctagcatcattatattttctctcatataataccatatatgttttctcattatattattaaaatatattacaatgacaacacaattgtaaattttgcaataactttatgaaactactaatgtgtaatattcatattatattttatatacgtgttagttattaattatttttatatcaaattttaattatttgtaaattatatatattcctacatggactctaaactcgtcttttaatatttatttttttaattctgaatttttattatttataattgcatttctatgtggactctaaactcatctttcaatattctttaatttttaatttcaaatttcagttacttctaaattgtattcctatatagactttaaacttttctttccatgtttttcttaatttcgaattttagttatttgtaaattgtatttttttacggactctaaacactacttttcattttattatgtttattctgaattttagttagttttaaattcatatatggactctatactctacttctaatatttgttattttttaattccgaatttctattttttttccttaattgtatttctatatggactatatactctacttctaatttttcttatttttaattccgaatttctattatttcctaattgtatttctatatggactctagtcccctcttctaatattccttattttttaattccgaatttctattttttttcttaattgtatttctatatggactctatactctacttttaatattccttttttttaattccgaatttctattatttcctaattgtatttctatatggactctatactctactcctaatattccttatttttaattccgaagtttagttctttcctaattgtatttctatatggactctattctcctcttctaatattccttattttttaattccgaatttcagctatttctaaattatatttctatatggactctagtctcctcttctaatattccttatttttttaattctgaatttcagctatttctaaattatatttctatatggactctagtctcctcttctaatatttcttattttttaattcagaattttaaaaatttctaaattgtatttctatatagactctgcattttctttttctccaattaatgtgagaatttctagaccatgagagcgaacgtggaggctcctttttctattcctttaataatataatagataagcgattcatataagcatatgcatgaatggaaagctggggccaatctttttttttcacaggattcaaaccgatttggaatatcacacatggcacaactattgtttatacggattctcccttttcaattactgaaaaaccccaaaaaaaaaacgagagttgcaactagaacatgaggtgaatatgggatttacagtgactattccagcctctttcagccgtccacgctgccgggaagaagcttacgactcgtggtcgtccgtgaagccgacgacgaagccgtcacgagccgatcagcggccgcaggaattacccgcgacggcgtgacgacttcgacgaccgacaggttgtacgagtccgtcccgagccggctctgcgcccaccctttcctgccggagaagccgccggccatgacccagcagttcttgaatccgacgctgttgagcgtcttcgccacgatcttcgagctgtcgcaatacctgcaggcgccgatcaatgtaagttcagaattgtcgttcatcgatcacagggcaattcaaacgatcgatcgcttggtttcagtgcaccgacgagtccatgatgatgacgttggagcccttgccgatcctcttgaggtaggagatcttcagcgcggcgatctccgcctcggcttgtttcgcgttgcgcaccatgctcttcgtcttgcttggaagctcttccagcctgagatcacatcagtgcaaaggtgttttggattttgccatggaaaaaaacaatggctatgtgccacttgaggaatggaaagaaatgcatacgggatagagatgagcttgttcttcgcgttcgaggggagctgtggcacgccggttttggccttgtccttctcggtcctcacatcgatcagcacgtaatcttgcgaggtcaccatgtccagagcttgtgcagcggtcaggtcaccttaaccaaaaaaaaaagaagtgagcaatcatccaacgaagcaaagcgtgcaagaggcgcaattcaatagccaattcgcaatgtgctgtgctgctacctttgtagccgcggagagtgaaagaaagcagggaccatgccggcggcaggagcaggtacgcgaggaacgccgctccggcgaccacgacgtagtccgcggagcccagcgacccgatggtctccaccgtcgccgacgcgatgggcttcgcggcgtcgatgaccttcgtgccctgctgcgccgcgtccgcgacggtctaccgaaacggagcatcgtcaccgaatcgaaacggagctgatcaaagaagctttgctcggagcggctgagacgtcgggtgtattaccttagcggcggacagaacgggggcggggtcgacgccggcgccctggagcgcctccgtggcttgcttggaggcgccggagaccaccggcgaggcgagcttcagcgcctgctcgccggcgctcttcagcgcaggcagggccggcttcgcggcctcgcccagcgccttgagcacgccggcggactgctcggccaccttgccgccgacgccgatgacctggtccaccgtgtccaccacctacgcatcgagaaaatcaagcactctggccacaatgccgcgaaacgagttcagagttccgacgagagcgagcaccgtagtggcattcgccattcgcgtaccttggtcacggagccggcgacgtcctccttggagaacgccgcggcgtgcgcggcaggagtcaaagcaagcaatgccgtcgaaatggcggcggcgacaggcgcggcgctcgctggcgcgcggcgcggcgaggcccttgcggccgcctgggctggcggcggcgacggcgcgaggatggccgacaccgaaaggggcgccatggcttcgcctcgccgtacagcgcagcgatgttcttctgggccacacacgccggcggcttgaactgatgtctatggctcacgacattttggctgatttcccagaattttttttcctcttcatttttggctctttctctgactttgtgtggccgagaagtcgtgaactgctgatccatcggccaccgggtcgtctcctgattggcgtccataaattgatgcgataaatctcagctaaattactgtactttaattgggtcactgggtggaagagttagagcaccataatattattattgggcccattgagaaggtgattttaagcttgctttcacactaggcccggcccattatctcaaacgaataataaattaaggcctaggccgaatgaacatctgcaaagtctattttcctccctcatctatcgcccttggtcgacaaatatccctcaaacgcaaaattggatataacgtctcccccatcttccaaaaccggtgcaaatcgactctttgagtggttttgtaagtggtttaggctgatgtggcaggttgacttgattcaaatgtgctgatgtggcagccaggttaaaaatagaagtgggtcccacatgtaagtgacaaatgctaaaataaaacaaatggtggggcccacttgtcagccccattttttcatatcttcttcctccctcctctctctttctcgcagccgcacgcgcggaggccgattcggccgcgcggcggcgcccttctcatcccggcgagcttctccttcgcgcccggccggccgcagcctcccggcgagctcctccaacacacgtgactagccgtggcttctcggcgagctcctcccctgtgcccggctggccgaggcctcccggcgcccggccggccgcggcctcccggcgagctcctcccccgtgcccggctggccaaggcctcccggcgcccggccggccgcggcctcccggcgagctcctcccctgctagtcagccaacaacattcgatcttggtttcggctcccggtcggctgcgacctcccggcgagctcctccctcgcgcccgcccggccacgacctcccggctgcaacgccatcttctccacgagaccatggagccccgtcgctcatgtcgcccatcggggacgaagatggccatggagcccgtcggtcccgccgcccagtggctcctgccgctccgccgggctcccgcggtctcgccgcccagtggctcctaccgcccccgccgccccgccgctcccaccgctccgccgggctcccgcggtctcgccgcccagtggctcctaccgcccccgccgccccgccgctcccaccgccgcctcatcgctcctgccgttcccgccgagttcccgccgtcccgtcgctcgcgccatctggtctgatgggaggtggttcatccgttcatggacgtcttccatgtcaccgaccgcctcggttgcaagctcaccaacgacagcgtcatcacctacatcgagcaggttggtgggttttcttggtggtttcttgattctggcacgagtgttcgacggagttgggattttctgatggcatacatggcttctttgcagtctctggggatgtggaacgggccaacgcggccgatggcgctcgaggggttgacggcgctggagctgacaggggccggccggacggggctcatctcggaggtgttcgccgtgctcgccgacatggactgtggtgttgtggagggccgcgcgtggatgcaccgcgtccacctcggctgcctcatcttcctccgcaacaaggaaaccgacaccgagaggatggcacgcatcgaggccgcctcggacacctcctcctcggcgactccatcagcgccggcggcggcgccgtggccgccgtccccgcccccgccgtcacgcacgccgagcgccgcctccacgttggacaaaaccacctccgaaaccaccgagggaggtgatttgctctggtttttagagaaaaaggaggtgttatacccggtttattcacacaagcgtaggagatgagggaggtaaagtggacttattcctcacaaatggcattgtggactaaaactgttcactgggccgtatggttttgacactgattgggctacgatttgcaaggaaatcgtcatgttcactgagtcttatgaaaagcaaagcaaacttctgaaaatgaaagatatcaatacgccattttcctatatgattgtgaggagtgacaagagaatgataaattaatgagtgctcaagagtgattcctgagaaaaattactcaagtagtctacgagctcagttattcccatttgctcagtagcatctttcatttgtttttttctctccctcgctatctagaatctaaccaacaggttctcactttgcttgaacagagcacagaatgtgaagtatgagatattcaaaggctcaaagctatacccctcttgcagaaaacaagtggactttatttttcattgtcgcattagactaatactaattctagcttcctactaatacaagctaagtgagtgtctagtcatcctaggaagcacaccaatgacctaccttaatcaggtgtacttttccacaaccacttgctcaactccccctacttttagtagtaatatccagtcccaaacaagagctaaaaataaaactacattctagggagataaacatagttaggagacgggcggcagggagcactatgcctttctgcctcacatgcatgccccacttaattttattccataaacaagagagtatttatacgatttgctttggctttggcatgtcccatcagctccatcaccattccatcccatcctttttgaagctcagaagagtccacattgactctccactcaggagattcaccaccattgcacaattgcacactcctctctcttttctttcactctccaatttgatgcaaaaaccgtcactgttgcttcacagctaagcaaaaatcctcatatagttccttctttaagcaaacagggtcatttaggataagccttttcttgtgttgcctcctttttttctcttcattagtctcttgacttgcctattagcatgaagtggcagcaaagtaaacagtattgcagttatctctgaagtctgaagaattcaagaaagaacaccgagggaacaagtcaaattagcacacatgacctgaacaatagatcaagaagttatcaggaagtaaaactgattaactcaatcctgccaagttcatttctaaagatacagattttacctcggtttacattagcacatttttcaaactgctaaacagtatatttcgttcaaaaactttcaatatagataatattttaaaatacaatataaatttatttttcaaatttgtaataattaaattcaattaagtatgcgtgaatggtttttctgtttttcgtgtcctaactttatctttgtcctcagtagaaacgcacaccccaatatggactgtacaaactaaaaaccatatattcaaagaccctgagaggaatattagttggtggtggtgatgccaacctagccagcaatcacaagttggctgtgcctgctgcacagaaacacttcatgttccatggcatggcaccatacgatttctcttttattttgtaaggtgcaaatcgcttggtcactgctcctgaaacggcgtctggtgcctttgccttcgccagtagtaggatcagctgcagcactgatgcttcgccgatcaacagggactcgtcagtttctctctttcgtcagtgcgccgtgcactcacgccggtgaggcgagccttttgatcccacttcgtcgagtttttttcgctggaaatgctcgtgcacgatcgcggatcgtccaatgtggttcgcccgattttgtctcggattaagaaggtttccgcgagttttccttaaacggacaagaaaccaagaaatggatagaaagcaagcgagattacggcactgaaaaaaaaaaaggtggtgagcgtacaacattttgcctgtcagtaatcctggtgtatttgcacgcgtacaggagatgtaagcagaagcagcacgcaccatgtttttaactgatgtcaggaagaaatatctagctgctccaatctggattccctgtcggcctcatgcatggggtgttctgcatcagtcgatcgagctaaccaaaccacgaactcctacataaacaatcttaattcgtcggttgaaacttcctcatcacaaagctggaagctagcagacagaatcagacctcctttttatatttctatatacaatactactttgtttactgccagaaatgccctcatctcccaaataggaggaggaggccactcgacgttgaacgaaaacgatatcaaagcactgatcgatcaatgatatttactccaaccacttgaataaacatctactactactccctccgtttcacaatgtaagtcattctagcatttcccacatttatattaatgttaatgaatctaaattgatgttaatgaatctagacatatatatctatttagattcattaacaacaatatgaatgtggaaaatgctagaatgacttacattgtgaaacggaggaagtagtatcgagcaggtatagccactgccagttactgctgctgggaaagagattgctggccggcaaaccgagctgggtcaatggaggtgctttgctttgtttgtgcttaccattgcacatatagtgctctgctcactgccactagggctcatgcatcggtagtggccttcactgtagaaaatgcgcagagagacacacgcacgagcaggcggtgagatcgacatggtatgatggtgcagtgctagcgcaaggctttgcctcttttctctttttctttgatttgaaatggaccatgcattcactgctattggttgacctcttccctgtccattgcttcgccaggatcaactttcttcttttcctcctctttccgtagcctttccgtccaggtgaagagtcgcgtagaatcagcgtgctgctaatagaagagattactaatctctggtcagcaaaatcctatgtgtaccaaatcaagtgacattgcgtctgaagttctgatgaattcctcgttctgaaagtcatcagatgcagcgagtttttgttacttcagagatgtggttcgttggtacccatagcaacgctctctcacatcgccccctcactaatgttaattagcatactgatcagctacactaagcatcacagattagccatctgaatcgaagacacagtgaaacggccggtggatagacgaagagagcaagcagctagctttagagaagctactactaatactagctccttttctgtgacttctaaaaccgagatcaatccagcaagctgcaagcgagagcatcgttgatacacgcacctagctgccggttagctgccgacgtgccttttcctaaactcaaagccagatttgcagccatcatttttggaagaattcaacgtattattacgcgctaatgatgaactgacagccaggtgacatgcacaggtcactacgtgttctcattggctcttccgatcaacatgcactacaaactagtagattcagcttgacgtgcaatgatgcttaattgggactttctaacggatcgagtccacatatcactcatgtctgattacctatctggatttgcttactggttgagtatgggcttgtgatatgtctagagtgttagtagaattattgcaaatactcgagtacatgcctggaaatttcggtgcaggggaatacgaccttgtcgcctgctttgttcgttgttgaggagacccacgaactgttgcggtgcagcggccgatctaattaattttacttgattattcagctaatttgtggttctagacttgattacattatgtttcacgttacaatgttccatttcctgaatagaataattaatgataattaggtaaactatcaagcaataggaatagagaaatctcggagcgttgaaaagcaccttcatactattgcgttgacttgtatatatatatatgtatacatatatatatatatagagagagagagagtgaataatcaacaaacaatatttttttatagaaaaagtaaacgaaagcaagcaagcctctgctgcaaaggagaagagagaatctctcgccggcatctattgacggatatgttaaatccgatcaaccttacaggaccatgattattcacatctatccatctgaaaaaaaaaattttgtttagatagaactggttagttctttaaatattcttattcttttatctcctctccatatgttatctgttgctccagcaaagaatcttccaaggactggtgcacccgagggccgatatgatgaaaccgtctccaaagagaaaaaggaaaacaaagtgttttctaacctggttagtttttagtttaagagcatccttttcttttacagtaaggcataaaaagtacggctgcttttccaccgtccaatcttataatttcttttctgcctttccgacaactacaaaatagggtttgattcctcaaaacgattttattgacgcagcggatcagatcaccatacagtacatttcaaattttcaataccgttactgcgcttggaaataccacatatatgtccatgtatccgtgtctcaactttacctgcagttatggaagatgatctgcatctagaaccaggggcggatccaacgtgggtgcaaggcgactcgagtcccccctacacccaaaagacccatggataccccctgagcacccccttaaattttttcaccatgaataataagctaaaggtccttagatggctggaggttaaataaactgtgtaattgagctccccctaatttttttcatggatccgcccctgtccagaacgaacattaaaagaggggaaacaaccgcaaccaaaatttaaatcttatagttgattttgatttttttttattatattttattttccaaaattaacatttaagacgctacgaatacatatataaaattagcacgttaaatagctaataagtactcacagtttataaccaattatagacgaagcagtggactgttgtgcatgtagttaacttatccgctagtgaagtattccctacattattttttttaatcaagactaggaagaaattaactcatccgacgtaataaaaccaaataattacatgtatgcatacaaccaataagcattaagatgattgcttgagttcttaacaataattagtttatagcacataaatactacaaatatgaccatctcttttggaaaaatcaaaaaataaaatatatgcataataattttgtatggatgggggcatttaactttttaccacttttaagatgcactccctccgtcctaaaatataagcatttctagcatagtgtcaagtcaaacatttttttattttgactattaatagaaaaaaataaaaaaaatattaatcatgtaaatttgatgttactagatttatcattaaacaaactatcataatatgcaaactatttttatttaaaacatcttatttttatagataattgttggtcaaattagcatctcgaagactatgtcgaagtttaaaatgcttatattttaggatggatggagtagtaattaaggatttttccacacacagtttatgacatgtggactctcatatgtttatgacttgtaggtccagtgataattttcttaattgtcacttgtaaggtaaatagttaaatatctctataaagatttttttattggatgagacatatctaatagggaccctatctaatactacgaatctaaacagaagcctatccagattcgtagtactggaatgtgtcttatcacactaaaatcacatatattttgggatcttgggagttgcgactttaaggagatcttcatctcataaaaacaatcttgtaggtctaaatctgaacataacatctaaaatatgtttttataaaattaaataagtatcttcatattagtattactattaggctctgttcgttctggggagattgggtctcgttttccagactcatgcttttcaaactattaaacgatgcattttttttaaaaaaaatctataggaaagttgctttaaaaaatcatagagtaaagtgcactagcggtccctaaacttgcgcaggtgtcatctagatccctgaactctcaaaacacatttttgggtcctcgaacttgtcttgcgtgtaatataggtcccgaacacaggcatgtctgcagattgccacgctcctgcaccttgccacgtgaatagggccatgcactgcatgcatgcatctatccatacgtgctaccgagcggacgctgaggaggccagcgagtagctgcggcgatctaaccaccgtcacgcgtggaggggtttggcgtgtcgcgcctgggcggggaggcgacgtagccgcgcgcggccggcggagttgcacgtggcggcggcggcggcgagccgcgcgaggtcgcaacgtcgacagcagaggagttgcgcgtggccgcggaggcgacggtgccgtggctcaacgccgaggcggacaaccacgacggccgaagccctgcggcgttggcggagtcgcgcgtggccgcggaggcgacgaagccgcgcgtggacgaggaggcttgccgacgcggaggtgacgccgtggcccgtgcggagatggtccctcgacggcgcttgcggcaagccggagctcaagctgaggcagaacggcctcacgctgaaggacgcggtgccaccagggtccccgttagccggccttggacatggcgagaggcgagagtgggggtcgcggagcgccatgtgggttactcggctgaagccagcggaatgttaggcggagctagccgccatgcatgtagcatgcgcccatgcatgctacatatgcacgcagcatgggaatccaatgcatgccgcccgtgcatgcaactgtaactatgcgggctaattgaaggcatgcatccgtaactatgcgggctaattgaacagaagccgcggcgtcacttgcggcgcggagggtgccgaggaagcggcctcgggcgaggcgagtgcggcgtcgcttgtggcgcggaggcggaggcgacggagctcgacgcggagggccggctgaggctgcccggctgggccgaggtgggtgtggcttcgcccgcggcgaggaggccagtgtggcggaaccgacggagccgatggacctatatgacacccaaaacaagttcggggaccaaaaaatatattttgagagttcagggatctagatgacacacccgcacaagtttagagatcgcgggtgcacttcactcaaaatcatattaatccatttttgaaatttaaaatagttaatacttaattaatcatgagctaatggctcaactcgttttaagtatcttctcaatcttctcaatccccttcttctcaaacacaccctaaaaagctgtagacgacagaacaagtagtaggaacttcaaggagatcagcgagcttcactccaccgtcagtcgcagtcgctgcaggcgcgcgcacggccaaaaataacgcgcagatatggggcacggcggaacgggcgaatcgaatgtgcgagatgtgggagagtcacctcgcatgcgaaagcggatctctctccgctgctttctgagtggggggaaaaaaaagaagtgatcaacgcatactcgcataggcggcagcagcaacgctgcttttctttctcttcttcttcagataggcgagagattgaaaaggacggagacggagagcgagcgtttttattccgccggccttgcctcccgcgcaggcccgcgcaggccacacgggacggccacggagacgacgaaacgtttgccaatatacggccatggaatttacccttctttatgtgattcgatttgatttgatctggttgcagtgtaccaccagtaggagccttcgaaagcattattaactgtgagtgagttattgtgcgcaccactactagcaaaataatcgccccgttatatttttcagtcatgcgacacgtataaaaaatccaaaaaaaattatctacttttaatacatttatctcttatctttatcaactccgacctaataatttctgaaagataaatatattttgagacaaaagaaagaaaaaattattctcaggagaaaagagtactagtgctaccatatgtgcgtgtagcagcgtaaggttttgttataccccttctttctcaactcatctctatcaattttttcgtgcttacgttttttaaattgttaaacagtacgtttttttataaaaaaaaatatagaaaagttgttttaggggtgtttagatttaggggtgtaaagttttagcgtgccacatcaggtattatataggatgtcgcatagagtgttcggacattaataaaaaactaattacagaatccataagtaaaccgcgagacatattttttaacactaattaatccatcattagcaaatgtttattgtaacaccacattgtcaaatcatgaagcaattaggcttaaaagatttatctcataaattagtcaaaatccgtgtaattagttaattttttagtctatatttaatactttatgtaagtgttcaaacgttcgatatgacagggtgaaaattttttaaatgggatctaaacattaccttaaaatcccaactcatctagaagaacaatagaaggaaaaaaaatcagtatccagatttgaggcaagaccagtagtatgagaaaatcagaagaaaagaaaaaaaaaccattttttcggtgcgcacccagggaaagcgggcggaaaagcggaggggccgcgaggcgaggcgcagaggatcaggtgggcgcggcccatgtgctacgggtggtggggcccacggacgcatacgtggtgcacgtaagacaagccatccgtgacgcgtgactcactcgcctccccccgcgccggtgggccccggggcatctcggcgccgcggaaaattacggcgctgcccctcctccggcttcgcccccacgcttcccgcgtgcgcctccccgtcggctaaagaatacgagcgccgctccgtcgagtactcgcgtgtacaggcaagcgtcggtgggcccacctccaacgtataccgtcgtcgtggtcttctcctcttcgtcgatctcttttttctttctttctttctttttgttctctttaacttttgaactgtgtgtatcctagctccataagcaaagcgatcgaggagagtagtgcaaaacgtgacggatatgtatggtgtggtgcgatcggttttctctactgacaatcgtagtcgttgtagctgttcggtgtaatgcgcggctggcttggtctcgctagctagatctcttttttctcttcaagaggggaacgtatttgcgtgtactgtttgatcgatctactttgtacattggtcttgggctcatggcgttagctagctgcttcgtcgcatacaatctggttgcttgaaaacttggtccacctgtcgtccttcccactttgttcatccaaaaaggagaggagagcgaacaattaatcgtcaatttaagctctggatcaacttgggggatgtgctctgttcgtaaaaaaaaaaatcctaagaatgagtctgaacaagctaggattacttttaagatcagatagtcattaatatccatacttaatagttgagtcgttattaaaaaatcttatactattcgttcaaaaaaatttattttgagactttgagtgttgtggtggtgacagtgagttgtacgatcttatccgtgatttgaaaaaccatttttacgtagcacgctgctactctcgctatcccataaaaaaataatctagtaccgaatatgacgtatcctaacactataaatctgaacatatatatttatagtattatgatatatcatatatattttattctagattcgttttttacgggacaagaggagtacatagactctagaatagatgtgagatgtccatcgccgtacggtgatttatttactattactagctggtgtaatcctccatgcataattatttatacgattcaaatgatgaacataatataatcttttttggaacacgcatgaaaatacaagcatttccaaccaatttagatgcttagggtgaggatcgaatcaatttaaaaattaaccaattaaatgagtgaaaagaaatatcttctatctttttttaaaacacattacaaatgcaagtgctcacaacacacgcacactcaacctatccctacaagcatctttgaaagactggactggcatatcttgtgattgacaaagtcatcacgggttgttccctatcgacagatactcgtttatcaataaaaaaataattagttgtaaatatgagcacccgtgtaagtatagtatttgaacccgggtggattgattctaccacgaaaatttaatcagttaagctatatatgcacactttgcaaaaaaaaaatctcttaccctttacaaaacaatttagatatacttatatttagaaacaaaggaagtactttactaattagccagttattttcacatgcggcgtcccaagtaaactaacaccgactccagctaacacactagccaattcaattggctagcagtagcattagctagtttgaagataccggttgcatgaactaaaaaaacactcgcatcgtcagcgaataacccatttaaaaagtttagtagatactaccacacctctaatgtgaaaactagcatacattttgcaggtcgctgtcgtgtgtgactttgtgccgctttctccaaaccctaccaccccagccacgaagctgccattaacagttaactacatatatattctcgaatgaacaactagaaaccttttaatttcggccgctgctttgttactcctacaccacttggcgtttacaattctgcgtgcatgtactccagggaggaagtaattatagaagccttaatttcactacgtgattagaaacgttgtcgggtttgttgaataatcaagccgcgcgcgcggcaactattgatcggcttctgatcaaccaagggtgtgtttaggcatcgttcgttctggggagataggggaggttgagtctcgtttttcgcacgcacgcttttcaaactattaaacggtgtgtgttttgtaaaaaaaatttataggaaaattgctttaaaaaatcatattaatccatttttgaaatttaaaatagttaatactcaattaatcatgagctaatggctcacctcgttttgcgtatcttcccaatctactcaatccccttcttttcaaacacatcctttagttcacgtcaaaattaaaagtttagttgaaattgaaacgatgtgattgtaaagttgaaagtttatgtgtttatgaaagttttgatgtgatgaaaaagttaaaagtttgaagaaaaagtttgaaactaaaaaaaggcccaattaatcgagagctctgccagcctagggcacaaacacttgcgctgtcatggtgtgccctagcctacaccctgctactgtaggctagggcggcagtgactggtccaccagtagacgtctttgtccatgtgacagctgtcttgaggtttgccacataagatttcgtggcgacgctgaagagagggggaggaactagaaagaatggagaggttgcatgtgtttgcttaatttgcacgttgcatgctctgctctttgcaaacaattttcacgatgttgttcgagataggttattgcctatttgcattttttttacctacattgtaatcttaaaagagtttatgtaataagacgataaaatgaagtaaaaaaacaagtaagcgtactctgcattatttttcgatgagttacgcgaggtctcgataataaggaaggaaatccgaaagagatgggcaatgatattaatacaataacttttgtgaccgatagcgagtacgaagatataattgagacagaattagtgattggccgcaaaagttgcgtgcgttgtcgggaatagctcgatagattaggggaattaatgaataaaacaaaagcatagtactacatgaaaaattagtacggtgcagtatttcgttccatgcacggtagataatttatcccaatatatcattttagatactgaagtgccaatatacctattgcttggtattgtaaatgtcatggagccccatgatgaagagaaagaaaaaaaaagtccattttactacttcctcaaactattttactatagcttttaatccccctaaactattttttagcttattttacaccttgaactattgaatattttttttatttttctatctgtataagttgtattttgcgttggaattgagtaggatgatgataggtgtatatattacaactttatgtctcatcatttttttagaatgtcatcactgtttacctaggttaggagcacctaggattgattcaaatatagagattataaggttcaaataaatagccatgaaaaattgaacacatttttagaattttgacaaaagtatcatcttcaaaataatcaattaaaatatagcttatatgaagagagaaaagaaaagataaatattattagggagtagaccgaactattttcaatagcccacggtgtaaaatgagtaaaaaagtaataattcagagggttaaataatccaataaaaaatagtttgagtgagtgaaatatatatttcttctggtgaaaataagaatccatggaaattaattaatccaaactatcggagagaagccctaactaagcatataccacacatgcagagtcttctaccaagacattcctccatatgaatcaaaaatacatgcaaaaaatacgtatacatacaactagcaagtacagcaaaattttcacatgaaaagataacagtgccgaaacccctggaacatactcctacatgcgctggaccgctgagattaaacggaatcttttcgtgcaaattgtggccaatagaccaccacatagccccaacacaggctgcccatcacatcggatgtcccctggggcccggccgcagggtgagcgagtgactgacagggtcattttgtttgcatttgtgcgcgcgagctgttcattttcggtggcgccggatcggacgtaaagcgcccttgcctgtggattccatcccgttggataatccggattccctgtcataggacagttacccgacaggtcggcatggactgatctactattggctatcagacgcttgttcattgccttggatctggtgtggatttaggtggtgtttgaataaatggactaatgataaaatccatcctataattaatctctattgagcctaattaattcataattagcctatgtgatgctacagtaaacatgtgctaattatgaattatttatgcttaaaaaatttctctcacgaattagctctcatttatacaattagttttattattagcttatgtttaatatttctaattagtgtccaaacatcgccttactaccgactccggtgtagagttttcttgtgtgtactgcatccaatgtactgatatgtaatgaagcgaattgtataaactcgaaggaaaagttgattcatacaataaactcgaaggagtattattagccaaaaaatcatttgtgagtgaaaacttttatatacggtttcttagcgacccaaaaataaacgttgtaaaataaattacaatgaaagtaaataaataaattaaaataaagttctaaaatttaagttttggcctatatgaataagcacaaacgaaataatgaggccctaattcatacttccctccaataacaaatatatgatgttcaacttttacttacttagaaatatattggtacacatatatatgtatttaaaagatatttttataacattataattttatcagattttacaaagttttaaaataaaaaattataatcaaggttacaccacgaataccgaaagaaaagtgaagcaacatatatttgtgacgggagaaagcatatcgttaatttttgacatgttctgcaacacaagtaggggtgtatgtggagcgagttgtggctagatgtccctcgtccatattatccaccatgagcgtcggagatgctacaaaaccactctcgattgactgctaggttatttgtgggtttcaaacccgcaaacccatcaaccaggattgatgtccgatgtggaagactaagccacaattcagtaattgcattgaaaaagctgttcaaattgtgcttcgcacacatcatgtgctcttgtgaacaaaaatgattgtgtgaattgcacatcgcttctcttctctccaagggatttcaagagaaaggacatcatttcctcacctcacaccgggaagccctgttttctttggtggtggcaagtgttcgatggagtttttgccgccttggtgagattttatccccaaaatccacttgaatacattctttatcattgagacattctatttttttgtttggtcttgcagacagaggtggtgtaaaataacatggcatgatcttcttactctatgacatgcttggttaggacttttgtattctctatggcctagaactactcgagcgagaccattttgcatcgtattgtgtcccaactagagagagaagtccttcaacaggcaggttagagtcgtgcaatagacacatggaatggtgccattgctatttcttggctaccatggccaccaccgccatggccaaccatgttcttcccctccacaagcaactagtacggaatagcagctgaggggcgatgggggttagtcattccatcatctctcaatagcaatcaagatacccgttacttctcctcgtctaggatgatgtgttttccttgtctggagcaataaggtgcgaggtatggcatcacttggttgatgcagtttgctgcaatgaactaagtgggtttatataagcgggctggtaggttagtgagctagcacaaactagtccggtaggttcctggcatgactcgtgccacttacaccccacacgtacaaagctaaattaaatccgcatattgaggggaaaatccaacgaaatacacaactgaaattgtttcttattctttcatatgcaacaaatacttttagttgtttaaagaggtatccactattagctcttctttccaataaccgaattcctccgagttgtatagggattaaatttgtccgcgtgaaaatcctataaagtttagagattccaaaggaggcctttagatgttttgagaatcaaaagggaaacttcttccttctattcacctgttccatggaattctaatccaatcacttgatcttttttgacaaactttgagttaaatagttttcatggttttgttcgcagaagatcttgggccgatgagatagcgagtctcctcggtgcctttgagccttcaaccaggcaacacaagctacagttttcacctttcagcgaaaaaagatgagatcgtatcagatcagatgctccggtttcttctagctccgttcgtctacctcaccagccgtcccttcccacccaccgctgccacgcaggggcaattccgtcaatccacccaccctgggcgcctataagaagccccctctccatttcttcaaactttagcttcagagccctccaaaagaaaaaaatattataggaaataaaaaataatttcctggttagaataaacacatttttaaaaaaaccaagaaaagattttcctcttctgttacattccttcttccttctccggccaccggagccgtagccgaattgtgcctcttctccggcgaggggagagggagagagggggtgtgagttttgctccttccggcgagtggtctcctccccgcgcggctgaggagatctctcgggacatcggggttggggcggcgtgcatgatggggttctcgctcacgccgatgaagatctccacgaggcttctgtggagcaccagcttcttccgccacaagatcgccgccaccatcgcgtcctcctcctccttcttataagatcatcttctccgccacagcaatctgtaaatatatacacatcgaacgcgacaagcgcgtttgattgattggatttttctcccctctcctcacgacaagtaattaaggcgcgcgatctcgatctctagcgttgagaacttgatccgcgatggagtccggccggctcatcttcagcacggcgggctccggcgccgggcagatgctcttcttggactgcggcgctggcggcggcggcgtcggcggcggggccatgttccatcgaggtattagtctcatctaaatctgttactaccaaattcacggcgtggctccgtggcgcgcgatttctgtactgattgcggttgcgatgtgggagtgatgaaggggcgagaccggtgctcggcatggaggaaggagggcgcggcgtcaagcggcccttcttcaccacccccgacgagctcctcgaagaggagtactacgacgagcagctcccggagaagaagcggcgcctcacgccggagcaggtagatactccagctagctagctaagctgtaaagatcggcggcgcgcggtgctctgttcccgagttgtgacgtgacgactggatcgatcggcgtcggcgtgtgtgtatgtaggtgcatctgctggagaggagcttcgaggaggagaacaagctggagccggagcggaagacggagctggcgcggaagctagggctgcagccgcggcaggtcgccgtgtggttccagaaccgccgcgcgcgctggaagaccaagcagctcgagcgcgacttcgaccgcctcaaggcgtcgttcgacgccctccgcgccgaccacgacgccctcctccaggacaaccaccgcctccactctcaggtgagctagctacgcccgccgcccgcgccaccgcccaaccgcgcgtaccctcgatccgatttggccggcctccttgattctgactgaattcgtggtgatcttgtgccgtcaggtcatgtcgttgaccgagaagctgcaagagaaggagacgacgaccgagggcagcgccggcgcggccgttgacgtcccgggcttgcctgcggcggccgacgtgaaggtcgccgtcccggacgccgaggaaccggcgctggaggaggcggcggcggcgttcgaggagcagcaggagcagcaggtgaaggccgaggacaggctgagcacgggcagcggcgggagcgcggtggtggacacggacgcgcaactggtggtcgggtgcggccggcagcatctcgccgccgtggacagcagcgtggagtcgtacttcccgggcggcgacgagtaccacgactgcgtgatgggccccatggaccacgccgcggggggcatccagtcggaggaggacgacggcgccggcagcgacgagggctgcagctactacgccgacgacgccggcgtcctcttcgccgaccacggccaccaccaccaccaccaacacgcggacgacgacgaggaggacggccagcagatcagctgctggtggatgtggaactagatttctcgcgcgcgcgcgtcgtcgtgcattcaattctcgtgttaaaaaaatcgttctctttttcatttttccgcttctttgtctgtaatgttgagtttcgatcggctatgagaaggaaggaggtgtatgcatgtgcatggtatggtagggtaacacatcggtgaatcaaatctgtcatggtgatgtacgagaattgaagaacatgggggtagcaataagtgcatggaggcaagtactcttttcaatggcacataccaaatcatgtcgtcgaattgagatttttattagtcttgaattcttcttgaacatgtcgtctctgattactgtagcatatatggtggttgatgattgacgtactccgcctccggttgaactgtagtgtgactagggagagccgagaggcgatcatcctcgtttaaatcaaaaagtttctgaagcttgaattttaagctggatgcatatttatatgtctagaaactgtagaacaaacataactgaaagtcagaccatctgaaatatatataattaagtgatattccagtttttgtgaagtacagtacatatcagtcttggcatgtcactgagtataccttaattaacgctgaacaaaccactcatgtactccagtttagggtgtgtttagttcacgccaaaattaaaagtttggttgaaattgaaacgatgtgacaaaaaagttaaaagtttttgtgtgtaaaaaagttttgatgtgatgaaaaagttgaaagtttaaagaaaaagtttgaaactaaactcagacttcaaactttttcttcaaacttccaacttttccatcacatcaaaattttcctacacacaaacttccaaattttccatcacatcgttccaatttcaaccaaacttttaattttaacatgaactaaacagtgcatatgacggattaattaactagtgatcgattgggacatgacggtgcgcgctactgctagctatagtacagtatgtactgcgtagtactcactccgtcctcttatctaatactctccccgtttcacaatgtaagtcattctagcatttcccacatttatattgatgttaatgaatttagataggtatatatatatatatatatatatatatatatatatatatatatatagattcattaacatcaatatgaatgtgaaaaatgctaaaatgacttacattgtgaaacggaggaagtataagggattttgactttttcttacattgtttggccactcatcttattcaaaataattttagaattattatttattttttacttactttattatccaaagtactttaagcacaactttttattttttatatttacacaaattttttgaataagacaagtggtcaaacggtgtaagtaaaatatcaaaatcatttatattagaggacggagggagtatagtagaagattgcactggtagtactctggtatgtagccacataggagttacattagcagccgaaagtttcaccgttattgacttattgttgcacagtgttcttcttccgtgcatgattacatcgaagacacaagcacacctaccacgagtgcgttatctaacacatattaaaagagacgaagactagtgaaatatctctaagggtgcgctcttttcagtttataggattagatttttctcgtttttcgttagcatgttttttaaactgctaaatggtatatttcgtacgaaaactttctataaagaagttataaaaaaaatccgacaaatttattctttaaaaaattatatattaatacttaattaatcatatgctaattgcatttctcgttttacgtgcggctaaactgcctaccgccactgctgaaacgatcgcaccctaagttcagtaaattcctatagaattgaagtgcactagcatgtgtttaatagtacatactaagtttttcttactaataccgatatatcatgctttgaatgtgtctagattttttataacttccatctatctaaattaaacggttaagatgattattagtaaaagtttagtaagaaaaatttagtacctgtagcattgctctaaagtaaattcgcacaccgtaaaaggttaaattagaaagggccgggacatagcttagcatgccgttagtgctaacacacataagctagactagattgcttacgggaatatgcagtttagctttctttccctttctttttagctagacacaaatagaaagactgaagatggtggtaaaattttcacatttattacacaatgtggacagcacgactgacgcaaacgattggccgtccgtcgtctgtctgtcgttcttgtttggctgtataccatcttcacgtaattaatgtatgcaaaatagtagtaagtgcattagctaggaggctgaaatgagaagtgaactgacaagtatttgtaatcagaccaagctgataagatatatcaagtttacaatccactagttttaagtataaatattgataaaatcaactgacactactacataacttatttttccgtgcagtcaaattgatttttccatacggaggttttccccatctggaacccagcgtctagaaaaatgaacattttcatgtgcgggtgacccaaccgcatgggataatcgattatcccgtgtggttcaattatatcacctgcaccgaaataaaacacgaaaatcattgtcgagcccgcccgcctcgccgcccgctcgccaagcctgccaccgtcgtcggtgccgagcccgccaccgtcgtcggcgtcgagcccgccaacatcattgccagatctgggcggggaacgtccgccgccgccggatccagccgcatcaccgcctactcgttgctcgccgccattgccttgacgccgtcgcgacgacggcgtcgtcgtcgagggagctgagcgacgacgtgcacgatgaggacgacgaccaggaggaggttccgccgcccgctcgacgctgccccgctcgccaccactcgcctccgcttcgctggtcgccgcctcgcctcacgcgcggaaaggccgccgccgacgcccacacggaaggaggggtggaggaggaggaggggaaaggatcaggtagagaatagatataaggtagagagagaggagggtggttgagagagaataaaagggaaaaaaaggaagagagaggatgccaaagtgggtgggagggaaaggagggaggtattttcctgtgcggtccatttaaaaagtccgcacgcgaaaatcgatttttccgtgcggtcctcttaagtcgaccgcacgggataatcctcataatgaggattatcccgtgcggtcgtattaagacgtccgcatgagaaaatgcattttcccgtgcggacgacaacccagcaccggtccccctatttttccgtgcggttctactcacggaccgcatggaaacaaaagagtgtggcgtctagaaaaatctatcctgtagtagtgtgattttctcgccttatgattttgcttcatgatttgtgccaagtacatctttccactgcaaattttattaagttttaatttaaggttttcactcagttagggtcctaaaacgttgaaccggctcaaaccttaagtttaatggtatgatcgctagctaagtggtcgtagtcatcaatacatggcgaaggtggtggcaaggtaaacttgcacattagttgtggatttagtgtccaacgttgtatacttatcggccattggcagtaagtgatagagttaaattgggtttgtaagttgagatttgtactaggaggcagacgggcaagttgctaaagatgacatagaagtatgtgcaacgaagtggtgacagagaaggaggttgcatcgccgatgttgcctttagtgttgacggccacagtggtagaggcgacaatacaacggaggcatcacatttttgtaaagcatgagcaggagtggacactaaactcggcaaaaataaacataagattttcttctaaagaaagatcagatttactatacacgattatgtatgcagtctcaaataaatatattggagcaaataaaaaggctaaatggtagtgcattgtactattataacttttctttgaaaaccatagtactattctagatcaatactgcataaatgctggtaaaaaaaaatacacttttggctcgatctcatccaaccaagcggaactatatgtggccatttccatccatccctctcgtctacaacttttattgttactaaggtgatgcatccctttcagttcatcatttcaccatattgaagtgatcatccatagcctattagttgggacttgggagcataccaaaacttagcatgagttatttatgttgtatactatagtcaaaattaagccacaagcctaaatacccggttgaataattgtcatatggatttgacgtgtatttagctagggcatgcatgtcctatggataatcttttgttacctagaagagttatattggtttggtctgaatctgatgtcacactaggagctagttgcagtagttaagtctagcaggaacagcgcaagagccattttccttggccttgataggacatgggaacatcttttgtcttttgcagccccactaattggacaagcataaccaagattcccccgtctctccttgttgatggagatgttgatgagagattgcagatacagagtgaagctagaagtgcttaatcaaccgctcgtattgggaggtgatcatgtactttcaagttataatcgcctgccaattagtactctatctgtgccatcattagtggcgctgataaaaaaatgagctaatcgcgagcgtctgattactttggcggagaaaaatctatcaggggacgagaatatttgacaggcctcgcaatccaagcatctatcggagttgcaatcaatcatgtcagggaaagaagaaaaaaggagagaagaaattcatttcctgacggcgattgaaaatcgaaggtgtggctacagtaaaaggcgtgcggttcggagattcagccgcgcgcggcagatcagagcgggacggagcaacacagcgttctccatgagataagagtagaaaaaagaacacgcggagttatggcgagacggcgatcgatcccgctggtgataagcggcctgcttaattacgcgacgtgtcaacgagacgaggaactctcggggggagaagaacggatgagacgaggtcggaggataggaacaaaaaaaaaaacacccaaacgttgatggcttgcgtgcggtctcgctccgagcgtgtcgttggtggagtcgtaatcccagcagcgcaattttggccgcgtttgcttgcgttgcgcggttgcgcccccgtctcggccgcggggaggggatcttccgtggacgcaacccaatcacccgaccgtgctcgtaacggccgcatcgcattggtgtttcgtcgcgatcctagcgtggtcgcgcgcgcggcagcgaatttgggggggtggggggtggggggctgggtggagtaggcggctggggcgcgtgggggctgcgtcaagtgtgcgccaatgaggggggcgcatcttgggcgtcgctggtgcgctttccagggttgatctccacccgactcctgctccgccatgttccgtgtccgccaatcggcgcgcggatcaagtcctcctccctcgcgtgatcgcatcgcctgcactacagcccctgagctgcgattcgctggccgataggatcgatcgtttctgccaccgacgtctctcgccgtttcgcctcgtctcacgagttcactgctccatcgacagttcgacaccgtggggctgctacagaggtttttttttttttcgacgagtactaaagtagtagtagcagtagaagaacagtaggagtagaagacaaacgggccggaagtgactgactgccagtgtggccgatcgaggccgttcgggagcagtgggtacagctggtccgacgcttgaacatggcaggttgttgaggtaccatgtggcatgtctgcagcactagggattgccatgcttcgaaacgatttgtcttgttttgctactattggtattactgtattattagtgcaaccctttcgtgatctcacattgggcaaccgttgagatggggaggattggtggtaccgtgcgtacgatgcgtggtagtggtagcaatagtgatctgcagtggtacgtttagaccgttgtgcatggctctctcgccaccagcattgtgctccagctggacagagagagtgatactctctgctgatcagatgcgattatacggttgcaatgttgctccatgtgccctgaacctcctccgagcgaagaataaggaggacgtgcaaggaatgtttcaggagtagtactaaactgcatcgcagcccagcccagcctggccccatttcagttgctgcaagcctgcaatcacggaaactcccaggccttcagggcccaaacacatatggtactacacgggccgcccgacttctccggtggagaaaatcgtactacctggcccaaaagcttttgtcgagaatttgtgaggcaacttaacttttattatttctttctcttttttcttttcgaatttacaagttacaacgatggcagatacatactgtacatacttacccacgcaaacatgcccaatgcagttgacaaacaagctggcttgatgtaaaagtacgtatgtacgtcaaacgaaacgtttaatttattagtgacctgattccttttaaatgccatctgatcttagccatatctatcgttgtatcagcaaaacatattcatatttttcaacgtcgctatagcctaagcaataagcctcaaaacaaatccccacaaaaggaagaaactccaaaacagccaaccacggccccatttttttttaaagcatggaaagcacgcaacgaacacaccacatatacacgattaaaacgtaaatgaaaagaaacggtaccagaaaacaagcgtagctctcgcagtctgccacgtcaaagagagctagagaggtataaccagtaaccaccattaattccaccaaccaaagcgagttccaatccacgctgtcgctctcgtcgcggacgttgcccagagatcgcttggccgcgcttatttagtcgccaaatcttccaaatcccaagcggcttagcagcatgtcgttctcagcttctcattctcacgcaccgagccaagccaagacagcgtctggcatggacttgatcgtccagaaactgttgcaacaccggcgacttactacctattagcagagggaaaaactcttttgttccagctgtcgagaccaattatttataaacaatattgttaatcagttaatattactactagtctaacccaaatatcccattaatcacgtttctgtcagaactgacaagagagcttcgaaagggatcgaacagggacgtcgcttttaaggacgtgtagttgcatcagtttgtcaaacgaacgagataggcgtgggatgcgattgacctagctttcagaactggttgtaccgccaacttgcggctgcgcgcggacaaactcttcttgtccagtaagaaagcaaaggcaaattaagcagctagctggttagctgctgctgcagtgaaaagaggaattgggtttggaagaagctgcatgcatggcggcgggggcgacgctgtcggtgctcctcctcgtcgccggcgtggtgctcatgctcgtgctgcacgtcgtcgtcgtcttctgggcgctgcgccggggcgtgttcctgcgcggcgcgttccgggtggaggagcgccgggaccagcgggccgccggcctgacgcccgacgagatcgccgtgcttccctgccacgagcgcaaggaagacggcggtggcggcggcggcggcgagtgcgcggtgtgcctggaggcgttccaggcgggcgaccggtgccgcgtgctgccgaggtgcgagcacgggttccacgcccggtgcgtcgactcgtggctgcgccagagccgcgtgtgccccatctgccgcgccgaggtggaagtgtccggctacgccggcaagccggccgcggcggtggccgaggcaagtcaggcgaccacgctggagatcgttactgaaagattgggaggcacagaacggtagtgtactctagtgtttgactcttgtttaaatttttactggttgtaaacttgtaattagtaatcctcgcgtagttgcatttaggaaatcttattgtacagatcaaatgggtcatctgatcagttgatcagctcaaccattctatgaattcaatttgattcatcatgtggaagtggtgctccgatcatatctgttacacaggctactcgttacgtatccaggtgctacactccaagtaactgtacttgttatgttcaggcgttcagcttacgtttttgtccagaaaagaaatgcgtcagttagggaaactgaacagatatgtgcagatcacgtctgcgtttgacctacctgaatatgcatttgccccaaaacaactacccatctgcattgttatctgttactaattaattaatccaagctagtcatttctgttgatcccttgcgtgccagggttttatcggagaacgagtctagcgaatgagatgatcgttagtccactcggatgctgggatcaaatttctttttaaaagtctagaggtatcattcgactcaagttgcaagttgcaacttctccctctagcttgtccgatgccacatcgaatcccactgaaacgtcagaaaccggagctctgaattcctctgtttcgtctgttctcgtcttcagctgaatctgattttgtttacaatatgctggagcatattccaaaatgcatacaaccatcaccgcgccgccgctgcaacctgtgtataactaattaaacatgactgccagctgaaacattatcccgcagcaaatttttaaaaccagaaagtcgtgcgttggactgatcctttgcaaatgatcatcagtacgtgatgtgaactgtctcccagagatgttaatatccacagcttgtgcattcttacaagcataacacgtggacgatatgtttatttttcgcctgacctgagaaagctcaccgtcgttcgagatctattaagcaagagggtaaaccaaggaggatgtgcttacgctgttgggaaactcagcaaggactaactaatactcccttcgtcccatgatataatgaattttaagtttttgcttgcgacgtttgaccactcgtcttatttaaattttttttaaattattatttattttatttgtgacttactttattatctacagtattttaagcacaactttttgttttttatatttaaaaaaaattgaataagacgagtggtcaaacgttatgataaaaactcaaaatcagcaaatattggtacttggtaaatggttcagttttcagatgccactagcattattttaaaccagtagtacttcggtagctaagcttgtgatatcacacctgaacggctgaacctcaaaagtcagaactcgatcagaagtctaagtctcatatagtatatatttaggtgttttctctgtcctaattcctaactgctactgctcttccattgctcgagcctcgaggtctcaaatgtgtgtgaagtccatccgcttgattcggttgatcgcatgaaaggagacaactccaacgtcttcctcgtcgccggcctctcgctggtggtcgtcgtccatgtcctcgtgctcctatgggcgctgtggtggggatacggccgctcgcgcctcgccctcgcccgcgcccgcgtcgtcgggcagcacgacgtggcgcgcggcggcctctcggcggaacaggtcggcgagctgccgtgccacgttgtcaaggagggtgccggcgagtgcgcggtgtgcctggaggcgttccgggcgggcgaccggcgccgggtgctgccgaggtgcgagcacggcttccacgcgcagtgcgtcgactcgtggctgcgcgtgagccgcctgtgccccatctgccgcgccgaggtggccgccagccgcggcaaggaaggtgacgcgccggtggccgaggccgcctccttggagatcgtcgccgaacgatagccggcgagcgttctggcgttttgtcacatgtttcgtccatttttgcaatgtcggcgacaaagtacaggataatcagtaacagtaagttttgttgtacaaaagattgcccgatttaaccattattcatcgcaatctctggcgttgttcagagacatcacgctgacaagtgacaactgatatggaagagcacgggatagcagtcatagcacgcagcaatggcgatggggatggaggagagaaaggatcgattactacagctacaaccaggcggcgtccttgatgggcgtgacgacggccttggtctggaggtagttgcggaggctgtagacgcccttctccctgccaacgccgctcatcttgtagccgccgaacgggacggccgcgtcgaacacgtcgtaggtgttcacccacaccgtcccgaccctcaatgcccgcgccagggtgttcgccgcgtccagcctctgggtgaacacccccgccgccagcccgtatggcgtcgcgttcgccctccgcaccacctcctccaccgtgctgcacattgcacgtaaggtgtttgtataaattccagttgataatctgtcacggtcagatggaattcgggggaattctagtgttgcaaacctgaacttgaggatggactgcaccggcccgaatatctcctcctgcgcgatcttcatttcgtcctgcaataaccggcaaaacgacatgaacagatgttgggggaaactaggcgaaggggtgtgtgaattgtgattgcattacctcgacgtctgcaaagacggttggctggatgtagaaccccctgctgcccgccctgtcgccgccggccacgagtgtggcgccactgtccacgcccgacttgacgtactgcaagatcttcttgaattgctcgccgtcgatctgattcaaacagagaggaaattttgggttacgggttgggttttatcgctgtgtatcttgagcaactgatttgttggtgtacctgaggcccctgctcgacgcctgtcctgaatgggtcgccgaccacacgctgcagagcgcgagccctggccttctccacgaactcgtcgtagacgcgctcgtgcacgaacgtgcgtgaccccgcgcagcagcattgcccctgctcgccgcacatcgcagaacatatgacattttgttcagagcccgttgctgaagacgcaatggcacgcaaaaacgccgtgcaaatagcgacacatacctggttgaagaagagcgcgcggtgcgcaagctcgacggcctggtcgacatcggcgtcatccatgacgatgaaaggtgatttgcctccgagctccagcgtcaccggcttaaggttgctccttgcggccagctcaagcacgatcttgcccgtgcccgtcgaaccggtgaatgcaagctacgcacacggccaaaatcctcagtaaaattgttacagaaaagcacccgtgaggttaatccgatggttaccttgtcgacacccatgtggctggagagagcggcgccggcggtcggaccaaagccggagacgacgttgagaacgccgtcggggaggccagcctcgtggagcaggctggcgacgaagagcgcggagagcggcgtctgctcggcggtcttgagcacgacggcgttgccgcaggcgagcgccgggccgaccttccaggcgaacatgagcagcgggaagttccaggggatgatctgcccggccacgccgatgggctcgtgtagcacctgcacgtggtgtggcccatccgccggcacgacgaggccgtggatcttgtccgcccacccgccgtagtaccgcatgtaccgcgccaccatcggcacctccgtccccgtcgtctgctccagcgtcttcccgccgtcccacgtctccagcgccgcgatctcatcggcgtgctgctcgatcaggtccgcgaaccgcagcaacaccctgcaccgctcctgcatgcacacacgcgcaaactcctatcatggcggtgcacgcacgcacgccgccgcacggcagctcgtggcgacacagttgcaacttacgtaggcggtcatccgcggccacgggccctcgtcgaaggcccggcgggcggcggcgacggcgcggttgacgtcctccgcgtcgccctcggccacgcgggcaatgacatcgccggtgcggggatccaccgtcgcgaacgtcttccctgaaggagaaaacatgcgttacgcctatcgatcgtgaatgtggactcgccgcggaggcgtgctggctcgagtagctcgtgtaccagatgctgcatcgacgaagttgccattgatgaggagcttggtgtacttcacgtccaccggcggctggatcggctcctcagtggctgcggcggtggcagcggcggccggtgcagcgctgaatctgtgaagtgatccaggcaagaagccccgtgctgagcctgtaaccgcaacgcagagggtaggtaagtacgtccagtgaaatgtgtgtatcaccagttgcatgtgtggtatgattgctctcaaatgctccatcaaacggactagcaaactacagtaacaattttgtttaaggagataatattgtaacataaaagttctattttcttattatttttcgtaagtacatctcaattggaacaaggaatagattcatgaattaagtatttgtttgttggtgcatgacgggggtgtgatctccctcccaggagagcatcgaactcgtgagtcgtgacaggatgacactgaaggtggacatgatgagcagtggcaagaaaaaaggggggaaaagactgaactgcttttggtttatccgagttttgataaggatccaattgaaagcgtcaaaatatcatacacgagaaaaacagaacctcatctccacggccacttggggaggagaagtctaactaactttagtggcatgactcactcatgacgctacttactagaaaccgaacaaacagaacagaaaaggacaaagttctaggaagaaacatttgaagacataaactaatctcactccatcagagacgctctcattgtgccgaaccgccggtcattttcatcagaaaatgaaagaaagaaggttctcaccgatttaacagagaagaacttacagtaaatcccctaaacactcatcgctcaattcaagcgacagaaaatgtaaaccatttctcaccaactcgagaacacaagaaaagatccaagcagagatcatcacctgctccaaggatagcggagtcgccagtggaggaggcagcagaaggcctcgcgatgaggccgcgagagaggagggaggaagcagccctccttgccgccatgataagctgcagcctacctccctgttggtgttggagcaaaccttgcggcgtgaccagaaatggaggagtgtgtatatataggtttttccttgttctccccgagttgcatttcagtgcagagaggggactatttaacaggcaagttggcgtgagcttgctgcagggctggaatttggcaatgacacatttgctgacgacaggtcaagataaggaaagagaagggtaggaaatatttgggaagagttaaatgtatcttttgccttccataaaagagaatgaggcttcacaatcacggtttcaaatcaatgaaacttatgatcagccacaatgaaatgagctttcggaaaactggacgatgcaataactctctgaaggtaagtctgcattgctagttgtctgcaacttgacattacactttgtttatcaggctgtttttttttccccttttgttgcacacggcaacatgaaaaattattccagcggctgttattagtaaaatcgttctcttcttatagcaaggaatagaagttgtgcagacaggatatacatatgtagataagattcaccggaaccaacagcatgacaccctagtacgagagtgacagtgcatatgcaagattcacgagaaccaacagttttacgtgctcctctaagaggagtacgacaatatgacaggacaagggattttggttgcttcgtaagaagaggagagggaatccgattcggccacttccacaggatggagcaggcgataagcgctggcgtacgttagacacagcaacacgccgatgctgtccgtcccccacagcattcgcgtgagaatcaagcacaggagaggggcatggccccgctatgttatcatgtacgtgcatcgcgctgctgcatcagcggtccaaatgcaaatcactgggcgcgaaagaaaccaagggcagctgccttacagttcagtcggcccggtttgcggccgtagggcagtgtacccactaggccacactacccaccacacagcgcgggcaaatctagaacatcatactatagtttccaccaatgtgtgtgccaaaaaaaaatattgtttccatcttcttggaagttaaaatttgtatttgtaattgtttgtgcctggagtggacagaggcattgttttggaaattgttctgatttagctcaattttgcaatactgggtcccaatccccacagccccacttatcgaaagctctaaacatgccatcatagctttcataagcctctgggccagaaactcaaaactcaggaattcatctctaactcctacagatttctagatcaaccacagcgcgcggattgtaagaatcaaggtcgcagcttatgcgtggccaagaggcagtagcgcaacctcaattagacaagacgaaaggacaacttatcacagtatcagtgaaaatcgagtgataattggtcacccatatggatgcagacatgcagcgaggaccatcagggcaaacaaagctgggccctgatgataaagatacattggcttgtagcctagtctagtatgtcttcagatgaaaagaggcaataggcaacgtccaggacctgatcactaagagttggcacctcactgttctacagccatcatggtcgttggataaactagataagagcaccatcgaggccaaaactgtgggcgcccgagcacacagaatcagatagtcaagccagtcctttcatggtatcatcatcaatgggtgtggacagtgaaaaaaaatgaccagacaaaattgcataactaacttttgctcctttttatccactagaaacagttatgtgattatttaggcgatgatagtgccaggaacgaatgtaacacatctacttgcacaactaacaatagcctgaagaaacaaaagacccatatcaaccgaacaccataaccatggcattgcatagtttaaggcttttatctcaacatcttgtgagtgaaagtgtgatcgggaaacggtaagaacctgattttcatgggctcacacccctggattctgaatttctgatgactgaatggggatggcatcttttcctctgatacttgaaaatgtcccaacatccgaaaaataagtgctttgggttccactgacagaatggtcattgtgcaccagtggatttgaaagctccattccctgaaggaaatgatagcaatagtcagacatgaaaagcaaaaggattttttatgctatctaaacaacataaagggaggccaaggtgatttactaactgaatctggacaaacgctacttccagattcgtagctagaagttagttttttatgggacggatggagtagtgagtagtgactagtgtgtgcctagacaagtgaagagcatacaaaacaagacatgtaacataaaccccataaagagtttgaggttatgtagcgaaccaactttcaataaggcaaacgacaagatggctccagttcaaagcaagaacttacttggactggtgtaaatgccagagttgatgttaaccccgaccttgactcactcctgtcacaactccttgccttgaatctggtatcaagaataaatataaaacaaaagtaataaggtaaaagaggatcatgtgaaaggaacaaaacatttttaacgcgttgcaaacaatgaaagcaagtatgatgcagaataaagaacggttgtgttcactacagaatgtaaagagtgactgaactcatcatatgattcatgagaacaaggtttgaactgcctggtaattttagagaaacatatatagaagtgcggtaagtgaaaagaaggggagaaatatccatcatgtatcctatgaaaagaaaatatttacatagcaaagtggaaagaagggacaacggaatgtttctttctggctgtttttcctatcaaacataatgcagtttttgcattgcgctagcatagcaaaccaggttcatagttctctatatcatcctatgccttatcattttaaaagtaaaatgccaacaaataatgacaaacaaaactgctcaccgtttggcaaccttagcagcaagtctgctttggccagctaagagacgtagtttcccacttcctgcttgtccaagcaagccataacctttccctaagccatcacctaacaacagaaaacgaatagaataggcaaaaagaaaaattagatgccagattcagccatgctgaaactaaacaaaacaccagtctggtgttcatccatagtgtaactaacctaatgagctctcctccggcacaccaaactgcatccgatttgccagcttcatcatgtcagtctgtgcatatctgcaaatcaagttcccagacaagacaaacaagtaacataatcagataactaaacacagtttttttcatgggttttcacattttgataaagtctgaaatagctaacctttctttcattttccggagccgacaacctcctctcttctttttgggcatacaatctggaacaggaagtggctttaggatcttcgcaggtggtaattcttgcaacttttcagtctttttacagatttcttctaacaagctatgcccagcttttccagttggatcccctcttatggaatcaatccttgctgctagtgttgattttgcagatataattctacatgcatgagttcttaaagatggaattgtgctttgaaatacttcagtttgttcaagataaccaacacgaaactgggatgctgcagtagaaaatccagacagatttttcttctttgcaccgagaagctgcaaattacaagagggcatttttgccaatgcttccaaaccaccagcagctcccatcagttttgaagcaacagcactcccaacaattgcagaaaggtttggtgcgatacatcccattcgactctataaaaaatcaagaactttcctctttgctgcatcaagagtaagagctctatcacatgctttgattgtttttaccaaattctcttcagaaagaggctccttgctagctattgaatcggtcatcataatccacattatgtctgcagatggcaaaatatctttcaaatcaacacaagttaaatccatctcatttccaatcttcttgacaatgtgggcataatcgattgggtggtgaacgcgagactctagtagaggaagcttttgctagtacttctcccgtatgaaattgtagatgatagtgatctcattatcgatatctactaataaagcattggaatcagcaataagttgatgttccaaatcttctggcaatatgcttgtccctctgtgaagagcatcttcaattttctgagagtagacatgtgaaagtttctcagtacattggcctaacgaaatgaatgacacgataaccttcagagtttgagaactgatattacaagagatgaaagaatagacacattactgctcacaaaatacaatagtattacttttcagtacagtaaattgaagaagtcaacacaattgtttcatgaaaaacaaattgcatatttgtttactttacactctaagatccacccagaaaactttgttaaagaactattcagcacgaaaaccaaccgggagtgtggaaaatagtagcagtacggttagtatgacaggctcagttaaaaggatccagcacatgaagttcttatgttaaactgtttgacttatgcagtactgggaaacaatgggcaaactcattagtctcaggcagccttaagccatatacagcatgattattctttttgaagaaagcaaagaagaaggcacacatgcaggcatgcagcttgaatattacaattgtagattgtagataaaaaaaaaatgggttgtacacattcagttacttacttgcataatgtcgttataacgttgagtcttatgaagctctgaggcactgttaagatcatcgtgattaagaaattcacagcaaggcatgccaccatcaccatcttcttccatatttcttgcctcttcatcttcgccttccttaaatagcacccataagttaagtgcaccattaaaacatcactatagcatacaattcattacatgtaatagaaatcaactcacgggataggcttcattgtccgataactcatctaagtcggccaagaaagaatcaggaagactggcctgaaaatttgcattagttggcaccttttagttagttgacacactatgaaaaacagaagagatgcataacagaaagttgactctggaagcatcaacattgattgccaccaggataattggacaaatgaaaatacattcatttaaccatcccataacatgattgctctatcaatccaacagtgatactattctgatcaatcgtgtggatctgtggaatacacaagattatgatatccatacctgtgcgcaagattctacaccacagaaacctccctcctctgaaaaaaatatgatatatgaatctacaagtattccccacgggcataaaagccaccaacctttcaattcaaatggatattaattattaagagttatagctcctaaattcatctatccataataagctaacataatacggttactgggtaggtctgaagtagaggaatagctacagtttctccacataatttccataaatcagccatccttgaccacactagcgaaatcagcacccaccactgaaccaaattttgccaccaaggttaatattaattcaacagcatggaatctgcagtagcctaaagtcctaaaccccaaccaacgaatttaaacgtaatcgaagcggaattacgactcaagttcctcgacttaaatcgcgattcagcggtaacgcctcgaaaaaagagtacgagatgcaacctagaaaggggcatccgcgatcgggggaagggtatgatctactagaagaggaaatagcagcgaccatgcgagatacggaagtgcttggaactcaccatggctggaggccggatctcctcggtgtcggcggcgagagcacggggcgacgcgggggcgggacggcggcgagggcagcagaacgccgcgactagggcacacctcccacgccgtacgcgcgcacggctccggcgagaaaaaggtttcggagttcgaacggtcggtttgattttgttttatttacagcttgtggagtactccagtcctcaagcaggtttaacggtatagccttgctacaattcatttatagccaatctaatagctaatttataaaatagttgcttattatactattaatatatggtacacacaatgtgtcttagattccgcgctgcagcgggctacatatctgtagcccactgctcttatctctcatcttttatctcactagcaatagtgcccgtgcgttgcaatgggaaaaacaccgttcgatgatgtgacactttgaaaacctcgaatcggtaaatatcaagtttaatttgatatattaccaaataagtagaaccgagattaatttgataaattagcatatgatttagaatttatttttcgagcctacttaggagtttatcgaacggattttaatttaaaaaatcagagcacattgtttgatcaaattagacagattcatttttatttttttgcctttttttaccgcgtccacataattggattcttttttttttgcctggctttttcaccagatttttttcgcctagttttttcgccctatttcttttttttaatcggaccgattctttttttatttttttcgcccgattacgttttttttaagaatcggaccaattcttttttatttttttgcctttttttcacggaatttgattttttttttcgcctgttttttttctcccggttttttcgctcgtccgatttttttcgctggtttatttacggacgacggaagcaccttttttttaagtatagtagaggtagagatagaaattttttaaccgcgtcacatataattcctttttctttgaaattggacatattttttttatttttttcgcccttttttttaccgcgtagacggagtcggattcgtttttcttttcccttattttcgcccttcttctagatcggacatatttgttttttctttcctttttccggttttttcacccgtgtttttttatcgaaccgatcagtttttttttctttttatcgcctttttcatgtttggtttttatttttctttttccggtttttttggatgggaccggtctggttttttttctttttatcgccctttttttacgtttggtttttctttttccggtttttttcgcccgtttttttaatcggacatatttggtttttttcctttttcgcctggtttttttgacgaacgatggaagcacctcttattttttaagtagtagagattaaaatatgtttacagctggctaatagcctgctaccgtacctgctctcatatcgcgagtctcgcgactccatgtcgctatggagcgtgtaaaaagaatcggatacgagcccatgtagttcgagcacgaaaacaacaaaaagtaagtatgtggaagatgagatgcggtagtaacgtatgattaattgagttttaattattataaatttaaaaataaattaatctgatattttagagcaactttcatatagaaagtttttacacgaaatgcaccgtttagcagtttaaaaatcatgtcactgaatctaaaatttcatccaacaatttttggacattcgaacgcagccatactctctccatccacaaaagttacacaaattacttttgtcaccaagaccaaaaataaattaaatcatcttagatgttataaaatcaataagtgaatgcaagcatacaaccataagtatataagtatttagatgactccttgatcctcatcaaatatttaatttatctattcatttaagttttaaatgtataaagactataactagaaacaacttatttagaaaaactcaaatgtgaaatatgtctaacttttatgaatggagggagtattcacgtatcgcccgactttttaagttaaagctgccgtaaaaccatgattttaattaagaaattggagtatttagttttacttagtactagtatgtagttgtgctcatttatactgataaagtaacataacgtatactttaaggtgttgtctttgagaaaaaaaaatgatagtaatatccatacaatatgcgtttaccatcttaataaaatatttttttagattattttacttcacatatcaagcttaaacgggttaaatcgtaattcttctttgacaatgttggaagcgtaccgggatttattcctgttgggctttctaggtccagccacagcccatggtgacagtaaaactgggcaggtcaactctcctctttttttttttttagaactgccagcatctctttcatgatgggaataagttcacttgccgtccctcaaatttacaccgaccataaaactaaaattgtgtacctctaaactatgtaaaaccgtgcataaaaggtcccaaggcagtatagagacctggtttcgctgacgtggcatcctagtcagcaaaaataattaaatttaatatgtggggcccacatgtaagtgacagaaaatggtgtgggccccacatatctccttctttctcttttttctcctatcttctctccttctctccggcgcagctttagatgggggagaggcagccggtggaggcgttgtagagcgggacaggcaccgacaagttggcggagagcgcggcgtcggagatgccgtggcagaacgacgaggattggacagtggctgtggcggcggcggcgtagcaggaggagtggccaagagagtcgtccaggcacggctccacgtccacggatgtcagcgccgagcgcgagcacgtgtacgcgggtcagcagccatggcgcgccgctgcccatggcatccgccgctccctcccccctcccctccccctccagctcagctcgcacgcacctctcattgtgcggagggagaaagaggcggcgacgggcggagggagaggggcggagttggaggcgacgcagtggggcggagtcgtcatggcacgtgggtgtagagtcggcaacgccgatgaccggcgccgctgtcaagcctgacaacgcgctgctcgcgaaccacctgctcacaacaccgacgacgaggatgcgtcggatggctggtatcccgacgaccccaccatcaccgacatggctgtgcatcggcgagcagctcctctcatcagcgagcctcctagtctgctgaagaatggccgagctcgctgtcgcgccgaccgcctcctctcatcctctccctccgccgccgtcgtgccagccgcctatctccccctctcccgctgtccccgcttcgtcgccggccgcctctctctccctctcttgccgcctctgtccccactttgccgtcggtcccctctccccctctgtcgtcgcgcccgctcaagaagagaaaaagaaaagaaatgagaaatgtgggcattttttcttacttacatgtgagccctacgtacttcttttaatttttttctgactagtataccgtgtcagcaaaatgtaacgcccgattttcgttcggaattaaaaattatttaataatgcattttctagaaattaaataaaagttaaatcaacttaatcaagtaaattattgagggaattaaaaatttcctttaaaaattattggccgggaatattttgtaatattctttgtgccctaatgtactctccggaattttccgtgaattttcggagctcgagaaatagttttaatagcacaaagatcattgcatcaattaaaataaaaagaaaaacaattaaaatcccccttcctctctttgggccattttcggcccaagtcttcattccctcccgcggcccgcgcgccccttttctctccctctcgggccggcctcctccctcggcccgctcagctctctctctccctcaagtctgctttacctccctcgcccgttttcccctctctctctacccgacaggtgggacccgaggccccacctgtcatcttcttccccaacctcccgtcgccccaacggccgccatggccgccggtttcgccccacgacgctgcggttcccgcgcttcaccccgccccacgagcgcgtgaaatcgatcccctccacctcctccaccttttcccccactctccccgcgaaaatcggcgccggttaacccctccaccaccccacgtcggcgccccacttcgccggccgattccgccacgtccagcctcgatcccgccttcccgagcccataaaaagcacccccgtgcttcccctcgtccatttccccttgtttcccgggcccggtactctctccctcgctctccccatgccgctcccacgcgccgccacactccggcgaactccggccgccgtttcccgtcgctagggtcgccgccgcactgcttcgccgccaccgccagctttgccgccgcccgggcaagctcggccaccgctccatttcccctctccacctccgtagcgccgtagccacgcgaaccacctctctccgccgccgccgccgactccagccgcgtcgcgccgccgcttcggtcgacgccgacccgcgccgttgcctccctcagttccgcaaggatgaggaggacctcggccgccgcccctcttcgccggaaatccgccggagctcctccttcctcggtcgccggtgagatccttctcatattgtcgcggtcggccgtcgttaccggtcaccacgcaccagtcctcccctctctaacccctcctttatcttcctcagatcgaggccgagcccgtccgccccatcccgagcgacgcccgtcgccggagctccgtcgcgtcgtcttcctgaggagccccgtcgccaccgttccttgccgtcggccgcccctttgccgtcgtgcatctcggtgagcactcccctccctctcccttttcctccccttcgtcggccgcctcccgggcgtcctcgcgacgcgctgctgccgccggtggccgtctgaccgggtcgctgccgccgcgctccgcgcttcgtgcccgcgccattgccggtggtgccgggcagccggttgctgcctcccccttgccgccgccgcgccttggctcggccgggccggcttcgtgccgcgcctgtgcccctggctgccgctcccctcggtcgcccgatcggctcaggccgatctgggccgtccacatggtggacgcgcacccgaggccacgtgtggactatgtccaccgtgcgccctccccctttgactcgctgatgtgtggggcccgcgtgtcggcgccggccgcccctttgctgacgtcagcgaggaccatttcctttgtaaaaataaataataattgcgcaataaatcgaatttaattctagaaattcatttaaatggctcaaaacttctaaaattcatatctaattcattcgaactccgaattgagccattcaacttgcaaaattcatctaaaattgagctctacatgtttgtttactttttatatactgtttccttggtttttattagagtttttcctcattttgcgtgccagcgtgtagttcccgtcgtttcggaagatcgcgttcgcaaggataagagttcagaagatccaagtgaagaagcaaggcaagtcacacattccccttgagcatgttgatcccaatttacaaatgttttactgtttgcaaataaatatgcatgttttgctaattacatggggtcagggttttacctatctgctcgcttgtgccatgtttacttgatatctgtcctttgtcaagtttgggtaataaatcgactagctcatgttacttatgtgacctagctagaactgtatgcttagccatgcttaattaccactagctcagttgatgggataattaatgtattagaccttttagtatcagaatgagctgcgtgctcgagacatctggccatgcttcatggtcgtaattatccaactaaaatgcgactgaatggtgggctgtgggtgcatggttttgctggtcgcacccatggcagttaaggaccggttcgcgggatgccctggaagaacttatcgtacttaccacaagccagcgtgggcaacggctgggcttgtagtgtagctttcctctagtcgacgcatccaggcaagggtgggcgtgatggagtggggcgggccctgtgatggcctctgtcgcttccggattcacctaggcacgagaggggactgcccgttgcccgctggggacgggggtgaaacctgaggtgtggtgtgcttggctagagggggttatgcgaagggtcctgtcacggcctctttccggtatgtcgtggtggcatgtcggcgcacggaaacgtgtcgtggggctgtgtcttgtgggtacagttgtacacctctgatcagagtaaaactattcgaatagccgtgcccgcggttatgggcggtcgaccagattcaccgtgattagtcccatcttaataaatcgacccaatacaccgtagttcaggtgggttggttgggcctgttcaacgtggtgtagcgttgatcagtggagatttaatgttactttaattactcaacagttttactgttttgctcaataaaatgttttacaaccgcctttatgcaaatagccacaaaccatccttgtatccccttgcacatctgcatcgttggtgtggcttgctgagtacggtggttgtactcagccttgctattatttccccttttcagaagtgtagtgcttctgagctgaagacgaagttagaggatcaaggctcagaccccagttgagttttgcctgtggagtggagctgaagccccgctaggatcgcctttttccgctgctgtcgttctgtttcggtgtgaggactaagtgcctcttccataagtattttacgctttatttacgtttggaactgtatattacttgtcgttttgtgtaccctggctggtcctggacagggatttactacgcaaaatagtctggaaatttgggttaaatttctgggcgtgacacaaaaccacccatatatactgccttgagaccttttatgcactgttttacatagtttgaggtacatatttttaattttatggttaagagacttaaaaaaaatatcgatgtaaagttaagagacggccgctgagcttattccttcctgatggcatattccctgtcgctggaggcctggacaccatacgagaaagctagcggaatcaactttccaccacgctcctccaacgagtggatacttcataccagtagtagtatatccgaatccaatgggacacgtaccgtacgaaattgagttgtcccctcggccacctgtgcggcacagcacaagcgcggccccgtcatacacagtaggccgcccgccagcgtgccggtgcgccgccacgccagctgccgcgcacgcgggctcaccacgtctcccgtcttcccggttccgggccgtccccgttgccacgcatggcaacggaccccgcgcgtacgtgcgtgagacgccgaaataccgtcacgcgcgcgggcgggcgggtcggtggagccgcgtcccgcgtggtgccggcgcgaggctgatccgatggggagcgggagctttgttccgcgtcgacgtcgtcggtgaacgcgcgcgcgcgcgcgaggcgggcgagagggaagcatggctggccacgtcccaaccacgggagacggcgacgctcgaccagtcaaccgtcgacgcgcgcgtcaatgcccccccgccgccgcggctgctttgcgaaccagctagctcgatcccccccccccccccccccgacttccaaaccaccaaaattttaaaaacatggaatcggatcaatcgatcgacgacgacacgtttctcctcccttagctagaagctcctcatgtctcacacgaccactcactttctcaagagttggacgttaccggccagaggtccatagcctagcaactaggatcacactgtagtacacttctacgaccaactaaacatggctatgttcgcttgagctggatgaaaatttattctctccgtacggaaaatagaacggtccattagcatatgattaattaaatattagctatttttttttaaaaaatatagattaatttaattttttaagcaactttcgtgtagaaactttttgcaaaaaaacacaccgtttagcagtttgaaaaacgtacgcgtggaaaacgagagaggtggttgggaacaaggggttgcaaacacagtaggcacacgactgactggtcgatcggtccatcgaattgatgctcttttcgattccactatccaaaaatgtgcatgccaagtcgtcgtacgttcaacccatcgctactcgattcgctaccaagcaagctacaaatgggcaacctgcaactagtgatcacttattatcctaacaccatcaggctacaaacatggacacaatcagcatcagagtactagatcaaaccataggctggtcttaactagtcatcacaggcacatgcacaccaagcagcgaaaggcatttggacccagcaaagccaatccatgcattgattcagtcgcagagataagataggaggagcccaaaaggttagcgagggcacaatgattcggttgcccttcagggcaggcgccacatccgtccccaatgattattgacgagttagttcgctgttttgtcagccaaaataatggcgacgctactccttactttgtccctctatgattgagatcgatcgtacattctacactgcaccctgtcatgcatggcgatctgattgaatacatagaagcgatcccgtgacagagtttcatactactactgtttataatggatttccctgacattgattgatcaaaagtataaaacgaaactgaacgagtatgacacgatgacatgaccatggatccatgttgatgagtgcggtagcactgtcaacttacttgagtaatgatcattagtccatttcgggccagctcttcctgttccagtactcaagtagtgcaatttatagcggcatcttcgatgctctctcatgtccggtttcttagagcaagtctaatattatagtccacaactagctccaaaaattatttataaccaatgtaacaaccaattcatacaatagttgcttactatactattaatatctggtcccacatgttatacacatattacgtcttgtagtccgtgctacagctggctacagatctatagcccgctactcttctctctcttcctttatctttttaaaatatgtttatagctggcttatagcctgctattgtacctgctcttagagtgagtacaacagcagcaggctacaagtcctgtaagcacacatggaggagagaagagaagaaagcgaagaaaagcgggctacatatttgtaaccagctgcaacacggattacaatacgttgtgcgtatatgagaggtgagaccattaatatattaatggtgtagtatatactcataggtaactatttgtatgaataaattattagattggctatagatgaattagagtcagtagctgactatactgttaaacttgctttacaggcgctggatattagagaattcgcctgattactcaaaggaacctaaattagatgatcctgtaataagagcgaaattagctgagcattgtaatctcattagcaaaaaacttattgtcaggtgtctgcaaaagacaaaagagataccatcattaagacattaacacagttctaaagaaacagctcacctaccattaccaatcttgtgatcctgtattcaacatttaccttcccatccaccaatccacgcggatcacacgtgtgtataccacaaataaatgccaaatatttcgggaggcaggacaagagtgcttcaccaagatcagaacaacaattgagcacccggctacgtaacatgcatccataattgatgattttccacatcatgacaaaagaaaacttgataattcacacgaagatgtggcttgttacacaggtcgggcacgcaaaaagtcacaccgcccagaggcgaagtagactagtggccaggctatgttgatcaatggatgcaattgaatttccttctgttgatttgccatttccccctctgcaatttcttcttctgttatctgtttcgtggactaacgaaaacttctgccaagacggcaagaaccgtgtgactttcaatgccaccatattgacatactactacatgaactctgttggtgctggcagctattacttagcccctgtttagatccacttcaaaatttttcactatgtcacatcgaatgtttgaatacatgtatgaagtattaaatataggctaaaaaaactaattacacgaattgcgactaatttgcgagatgaatcttttaagcctaattactctatgatttaacaatacggtgctaccgtaaacatttgctaatgacatattaattaggtttaataaattcgtctcacggtttactgacggattatataccgaacaccctatataatacttgacgtgatacgctaaaactttagaatgtaaacacccccttactactaagccgaaattctgggagatctgattagtcaaggaagaaacctcgcgtgtcgcgtgtcgcgtgtcgcgtgcgcgcgcgtgcggcccaacagcacgggaaccggacggagaggaggaggaggcgaggagatctggagatattctcgtcgcggatcggggactctcctcgcgcgtaaaataataacaagaggaggcttgggtcgctagcttgcttggccctcggcacgcacgtcgatcgccgggtccaggccggcgacagcgacggcgcggacgcgccagccaggcggcgatgtgaccggagccagacttttcgccacgtcagagctccgccgcgaccgttctcgatggcaccgatggatgcaagtatgcaaccgcatcgctgggtgatgcatatgttttcgctggtgatgcatgcatgtttgactccctagtaaacccatttaaccaaccatcttacttacccgcgaggctgaagtgcttgtgtcattgtggtcgtacggcttcatgtacgcatgcttcacagttgatctggtccattgtaaacttttcgccttgaccatgaggaaagttacggctttcggtgccgttattttgtttctgagcgactgttcggtgctatctattagtataactagactccccacgctttgttgtggaaattactaaacaattttaaatatatatttttaacaattaagttaggagtaaaaaattaatagtaatgaaacatgactgtttttgttatcccttgggctgattttacaatgtatatcagtacttatagttaaacagacaaaatgatacacatgctttaatgtgaaatatattgataagtatatattaaataatataaaaatcatagatagatttgttaaaatattgtgcaaataatatgaggggtgataattagatatgcttgcatagggtcctcctaatacgcgatcgatcgcccgtgccgagggtccgcgatcgggaaatcccacatgggtcgctctaggtttcctgttttcgcgttcagaaaacaagaaagtacgtgtgtaaacgggaaacaacgatgtgtaaacggggatccataaatttgaaaaaataaaaaacaacaagttagaaaaaaattaaaagaatatatcaaaaaatctaatactcttatttatttatgtgcatagactatacttatgtatatagactttataccgtaaacttcgcacgtataaactttatgtatagaaatactatatataaaaatatttgaatttaaattcaaatttgaatcgggtatataaactttgacttataaactttgggtctttaaactttaggtgtataaactttagatgtgtaaactttaggtgtgtaaacttgaggtgtactatatataaaaaatatttgaattcaaattcaaattcaaatttgaatccggtatataaacttttaacttataaactttgggtctataaattttaggtgtataaactttagatgtgtaaactttagatgtgtaaacttgaggtgtacaaactttaggtgtataaatttactaaaatagaaaaataatgcgatgccaaaaacgaaaccacttgagaagggggctgatcacgcgggattatgggaaacggaaatcggatgcggttgccaaaaacaaaaacttctatctgatcgcggtccgatcccgcacgcgatcgatcgctaaatatccttttcggcttgcatgttgatttgtataattaagggcctgttcactttgattccattttcaaccttaccaaattttggtaagttgccaaaaaagtggctacatttagtttactgccaaattttggtaactatataaaaaatcatactaaaatttaggcaagttaccaaaatttttacaactatgccaaaattttggcaatgccaaaaattggtaaggtttttttaggcatcaaagtgaacaggccctaaataaattatagatgatgttgtatgtttgcatgagattaaatatgtaattattgctagtgatgatgtggcatggttgcatgttaaagatttaaatttattgggctataactttatagaaagtatagatcctatattaacactataaatgattttaaccttttgttattgagagtaaattaataattacgaatatagtgattattagggttaagtttgttatttatgtttcttttttctggctagatcgatatgtgatcatccattacgctgccttcgctcatatttcatcgaaaaaacaaaaaggagaacaaagatttagtcactgctaaatacacctaatttttaacaataatatccctccatgtttctactacccctacctgaggtggcaatataatagatatgaacccttcgaacaaatgagaccaacgatttagattactttctactaccagtagagagcaccataatgttattacaaattacaaattattatggcttactaacttttatatggtacatttttatacaatttactatatataagttttccaatactagtttcttttctttaagaaacacattacaaatgcatgggctcataatgcacgcatgctcaccctactcttatggaataactctggaaaattgtgccggtatatcttgaaattgatgatattatcaccatggacgactggctatcaaatggatatgtcgcctgccactgaaaaaaatagcgtaaatgtgagcaccactatcaagttccctccgtaccacaaaatatagcaagtggatttgacataacctattactacaaatttaaaaatattttcagatttatagtgctggattgctatattttgaagaaaaatatgttcagtgtaccatcgaatattatcacataatctgccatcttcacgcatcagttttgttgcgtgtgaaattgtttgcatgtactactacagtgtgtagtaagcaagaagcactatatatatatatatatatatatatatatatatatatatatatatatatatatatatatatatatatatatatatatatatatatatatatatatatattgaaaaatacacgcaggtgacctgtcagataaaacatcctctagcagaaaacaacgtctctccttccatctttaattttcactttccagtcaaataatgtgatcggagacgaaaggcataagcatcgcataatctgacatttggaaaagtcgagtagtcatattgttgctgagaggaggggttggaatatgccgctgtcgaggtagaacttcagatgcaagcttgtggtttctgaagaatcctgtaaaatcaggcgatgcaagattcctgacgagcgacctagctgtaaacagtcagtcttttttctctgaaagttcattatattcctatgcatccttcttggaagcaaaattgagaatttttagtacttatcttctcttttcccgtagtgttttcttttctcaccaaccctcatgacttttcgatcgaagtaaaattcgtcgggcgactttagattctctcccggtaatgtttgatgtttccatcacgtgtaaacctgacactgatatatctacaaaatcttgaattcagttcctcaaatccaatattctttgcatcttagaatttttattgctcccccatgtgtcatcacatcgagattctagggcatacatctcacctggaaatgtcccattttgatttctcagttttgttggattccaatgattaaaatatcctgctctgtcaggtttaggtggcacctatcgagttctttaaaataaaaaaaatcgtgttttttcctggaattattaatttgtctattagtaaacgagaagaagaaaaaatatatatatgtacctactaattgaaacagtttaatgaagcggtggcctcaccaaagatgcaagtgagacattaagaaatttattaggcatgaggtgcaattcccttccacaagttcagcaagtctgtcaactatatacaaactggagttcattacacaagttgtgcaaaaatacggacttccatttaccaaattatgcacttcatatgtaacagaaagaattaatggtccaacatttaacattgctgctaaaatctgctaataagaatcagagaagtacactagaaggttgtcaacatctgaaaacaacaatttgaagggaaaagacactggtaaaatgccaaccatccttgctgactagtagctagctccatgactgagatttgcatagaagaattaagggaccccaagaattaaagaggtacactagaagattgtcaacatctgataacagcaacttgaaggttaaagagagtggtaaaattaatgccaaaccatccattgctgactggtagctccatgactctgaacttatcttatgaaaagcgccgcatgcaatcaggaattaaataaatcactgctaatagcaacatacttttcagggttcatatagtatatggacgcctctttggggagatggattatttttttgcatatggttcgcacatcattctcctgtagctttctaccatttgtttttccccggcatgtagctttccatcatgaagtacacatccgtgcttatccctttctattattttttacatcctgtcacacaaatcagcagccagacaagttatcggaagaaagaaatgctaataactacgtggacacatttactgtattttaaagtatagaaaagaaaaaggaaattaaagctcccatcagaaagatctcaagacccatttgggaaaatgtacaaaatacttcgatatcttttagcagaaaaagcataattaagtttttgcatttcaaatgaggccttggtaaaagaacggagaaacactcgagagtctatttgatattagattctttccttatattcgtgtttttttatttgacgaaaaatatcctgaccatatttccagagggcttaaagagttagcaatgaggagtaatgttcgaaaaagaagattaactaaactatatgaaaatttactatatctttagatctcaatgtgaaattacgattttatgaacacatattcgggaaagagaaaataccaagaaataaaaatctgccaagaaaaaagggtcacttggattggatctctccttctatatatactacctttgttttgtagtctttaacttttacatgtgctaattttcaacttgacagttgatgatggatacatccttgtacgtttatctcaacaaggcagcgtatttctgggtgactttttgactacacatgatacaacatcggcttcaaacctaaacctgtacacgtaatcccctgtccagtgctaaataagtccaacaaaaaagttaagcagaaaagcagctggtttggggtctgaaaggcacaatatcacactgattaaaaggcacaaccacgtatcaaccaaaccaaaacccgctccggtataccaccccccacgcgtccaacaccccctctcgtccgcacgcaatttctagccacggccgcgtcggctactccgctcgtctcgtctcgtctctctgctctgctcgtcgactgccaccaccagtccaccaccaccttcggctgatacaagaagcgagggggaggtaggagagaagcccaccacagggtgaccccatcggccatcgcgacatcttcttcttcttgctcgcttggttggttgctaacttgctcgctctctccgcccaaaaaaaaaaagtttctctcctttgcttgtcgtggcgttcttggatacagacagcgaggaaagtcgcccattttcgtactaggagtaatacaggttaagaggaggcaaagcggaggaggaagctactggaagtgtagtagaagaggagagggagggagaggagtgtgtagtgtgcctgcctctcgcaagcggccaagcgcgatagattggtatagacagataaatcctgcaactgcgatacgattccgtcaccgaatcccttgtttccttgcagcaatttgacgccgcgagggcgggtggtttcgtggccatggcggtctccggtgcggcgcattgagcccagcgtgcgagggggcatggatctggaggccgcgcatggcgcggctgcggcgccagggaaggtgagctcctcgctggggttgttcgacgccgtcgcgcggaagatttgagcctcttctcctcgggtttcatggttttttcctgactggttgttgcttgagttgttgggcggcagcagaggaggaggagggcgagggagtcatggggagcgtcgctgctgctcgcgtaccagagcctcggggtggtgtacggcgacgtggccacgtcgccgctgtacgtgtacaagagcgccttcgccggcgacgacatccagcactcggcggggaacgaggagatctacggcgtgctgtccttcgtgttctggacgctgaccctcatctcgctcgtcaagtacgtgctcatcgtgctccgcgccgacgacggcggcgagggcggcacgttcgcgctctactccctcatctgccgccacgtccgcgcgggcctgcttcccggcggcgccggcgacgagctcgccgtgggagggcgtcgtgacgcccgggccatgtcgaggctgagggcgatgctggagaggtacagggtgctgcagaggctgctgctcctgttcgcgctgctcgggacgtgtatggtcatcggggacggcgtgctcacccctgcggtctctggtttgacctctcccatcttggttttgggatgcttggttgctttggcattctactattgatgctgtgaaaaaattgtgatgatgctaaattgctaattattgtgctttgatgctgccttttcagtgtactctgcggtctctgggcttgagttgtcaatggagcatgagcatcacaaatgtaggttaattgtttcttttaatttgatatctattgatcactgggagtagaaattgctgattctggtcaatttaggagttgacgactatttggtatatatggctggtatttgttatgttttgttcacatccatacatacgagatgcttactgttccaatgatgtaaatgtgcagacgtacaacttcctgtgacgtgtgccatacttataggcttgtttgcgctgcaacactatggtacacacagagttggatttatctttgccccaattgtctgcgtctggcttctctgcataagtgctataggggtttacaacattgttcactggaaccaccatgtgtaccgagccctctcaccatactacatgtatcagtttctcaagaagacccaaacaggtggttggatgtcactgggtggaattcttctatgtgtaacaggtatgcataagctagactgttgcctactctttgactttttgactttggttgaatgatgatggcagagaacttaatttctttttcattgttataacttctaggttcggaagctatgtatgcagatcttggacatttctcacaatcgtcaattaaggtattagatttgagatgaacatgttacgatatactccctccatcccacaaaaaaaccaaccatcccctcctagtgcaacgaatctggacaaaaggggttacattcccttctaggttggttttttatgagacagagggagtataatacagtgactaaaatagtagactacatggtttactgtgatttccctgctgtctaatctttcatttcttgccattttatttaggagtagtaatcattataaaactatattgacctcttgaataaaataatctctatagaaaagttaaatattaaatgcgaatgacaccactgattatcttcgttcaaaagctcaactgattaacctgattaaaggcatatctaagtcattttttttatgtatttttcttctgttgcaaggtactcaatgtgtacttttcctagatttaggagacaagaaaaataaaccaagtcactttatcattgttttgtttcttccaattgattactaactatagtctgtgagtcggtgaactcctcattcctatatttcacaatgttccttcctttaactccatggtctttatatcttgacatgtgcttgtcattcttgaactaaatcattgattatcttcagtttcttatgttatctctgcttccaacagattgcgttcatgtctgtggtttatccagctctagttcttgcttacatggggcaggctgcttatatctcacaacaccacagctttgagaatgcttatcatattggattctatgtgtcagtaccaggtactctcttggattaggcttttgttgtttgtaacattcacaataaagtaattgacaagcatagcaactgcatattctgagcattgattcatgcaactttgtcttcagaaaaacttagatggcctgttctggtgattgctatactagcagctgtggttgggagccaagcagtcattactggcaccttttcaattatcaagcagtgctcttcattaagttgcttccctggcgtgaaaattgtgcacacatcatctacagtacacggtcagatatacatacctgaaatcaattggatcctgatgatactctgcctggctgttactcttggcttcagaaacacgaaacatttggcaaatgcacaaggtaagacaagctatacatatagctatttctaacgcgcattgagaagcatctagtgcttgttctcactgtttgtcctgaactttcttgatacaggtctggcagttataactgttatgcttgttaccacttgtttaatgtcactggtcattgtgctttgctggaacaaaagtatcttccttgcgctcggtttcctgattttctttggcacaatcgaagtactctacttctcagcttcccttgtcaagtttcatgaaggcgcatgggtcccaattaccctctcctttatatttatgatagtcatgtgcgtgtggcattatggcactataaagaagtatgagttcgatttccaaaacaaggtttcagtaaactggctcttgaaccttggtccttcattggggattgtccgtgttcgaggcattggactgatacatacagaactggtatctggaattccagccatcttctcccacttcgtcactaatctgcctgcatttcaccaggttgatcatcataaattcataacttttcttttcactcgactatttaacttctagggtccttacaaaattgaatttcccatcaggtactggtttttctgtgtgttaaatcagttccagtgccacatgttcaacctgaagaacggtttctagtgggtcgcattggtccaaaagagtacaggctatacagggtcatcgtgaggtatgggtaccgtgatgtgcagaaggatgacatagagtttgaaaaggacctagtcagcagcattgcagagttcatccgcagtggggattctcaccacaacggtgttttggaggacacagacaagtcgtgtgagaaactgtcttccatcagtaatggtattccattgtggatggaggatggagaggtcgatgcttcagcatcccctcataaggagacagatacacagatcatatcaccaaaccgaaagaaagcaaggttcgtgctgccaaagaatgcccaggtggacagcgaagtgcgccgtgagctgcaggagctcatggatgcaagggaggctggaatgtccttcatcttaggacactcctacatgaaggcgaagagcgggtctagtttcataaagcgaatcgtgataaacttcttctacgagttcttgaggagaaacagccgcggaccatcttatgctgctaccatacctcatgcctccacactggaggtgggaatggtctaccaagtctgatagtagcagcagctgtataaagctagagatgagatctccatctgtacatatcacttcatgccgacaccgctaacctgaaggtggcagttgatgttggagcacctcatggccagccagccagttgcaaatcttgggagagccaacagggagtgtgcatttttgtctgtaaagccttctgttgagctgctccgtgttgttttttcccttgtgaagaaacctttcgctgttgtggataccactgcgaaactggggaagtgtaagtctgtaagagtgaccagcaaatgatagcatttttgttgctttagcaacttggtaacttgtctaaaatggcagtgcatcgccaaagggaagccttgcgtgtcctcagatttagcagtagcttcgtttttcctgtgtcttgggccaagcccaacagggccgacgggaaatcgaaatatgcagttatagccgtctgtcctcttttgtgaggattgctggattacaaacttgtgcgcattagaaaatcccaacaaaaatgtaaattacaagttaaagcacacgttctcctcactgtcaatccgccacatgtatataaattttaaaacggacatgctatatttatggcgacacaaaattagcttatcatggcgacacaaaattagcttatcaaagtcggttaatctatcccttggatatcatgtagattcgtgttgcactatcgatgcttgatttaacgaacgtttgatttgctaagtctgtagttattcgatctctctgtactacgaacctgttgctcttattatacattagtttccattgaatttgcactagcatctcttctatttatatctatttacatatgtaattttagaacttacattataaatacactaaaattacatatgtaattagagtcttaaaatgtaaatgcataccaactttttttttaaaaaatatagcgtcataaatatagctactcccttttcgaacagaattttccaaaattgagtaaatatacatactaccactgtgtctcagaataatccgtttgagaataagttaatttacttcgtttcagaataaattaatctagtataggatataatatattatattaatacgaatttaaacaaatgcaataagttagtcagtacgggacagtctcagtctagtttcgtagtactaaatatatcacatcatatactagattaacttattttggaacgaagagattacttcacggtgcatacattaggccttgtttagttccaaactttttatttaaacttccaacttttctatcagatcaaaactttcatattcacacaaacttctaactttttcattacatcgttccaatttcaactaaacatccaattttaacgtgaactagatacacccttaatctgtgcatactttcatatcctcggagtatatgctgaaggattccagacagaagggtccgataatctggttgctggcccctccaacaaactgcgcgcaaatcgaggcgccaatcatctctagctcatgccttgtgggctctattatatatctctctgcggcccacttttggcccttagcttacagcagcctcctgttcattcagccccttgggccccgttgctgcacagcttctctgctcacctcttctcgtcgtcgccaatttgctactgctacttcttaaagattcgctcctaaaacttgcatagcttctactagtttgtttccacggtacatctttgtactggctacacaagattatttaaaaacagtgtccttattccttagaactgtaaaaacaaaccactaacttaaaaaatatttttattattctttcctttttccaatctcatgcgaccaacctttcattttgtggaggctatgagttattattaatatgttgttaaccacaacaatgatatttgcacggggatatttggttgcttactaactttgtcaaaccacaccttagacgaagtgtggctgccacagatggggccaaagttagctcgaaatataagtttatgacataagggaccacatagagaaaaaatgtggctagtcacaattgtgtcatcaactaaataagtagtttaaaaaatgtagcgcgactaacttgcaagtttgtggcaagcaaccaaacatccccgtgacctctcctattttctttttcttatgttagtaaatatttctaattcgtaaggctatattgatgatcattatatatgccctaaacaacattgccttactataaaaacgacattacccaatttcctcaatactataaaaacgaaattgtcgttcaggcaatgtcgtcaatttccccaatctcatgcagtggacctaaacgacattgcctggaagaaccgacatgtacgagatttggaataaaaacgttcgaatttacgaaaagcttgcatctggtacactggtacaggtaacgttacagtaactcttggagtgaaccaacttgactagtcttggataccatggcaacgtggtctttccctttctccagattttgcctccacaatggccaaagagtactcgcattgcatcgagagtgaatgaatgaatgccccttttgatatttgtttcagcgtttcaccctttccaggctcagctaaggcccattttagttcccagaaagtttttcccaaaaacatcacatcgaatctttggacatatgcatagagcattaaatgtagaataaaataaaaactaattgcatagttagggaagaaatcacgagacgaatcttttgagtttaattagtccataattagccataaatgctacagtaaagcacatgtgttaatggcagattaattaggctcaaaagattcgtctcgcggtttccaggcgagttatgaaattagttttttcattcatgttagaaatcctcttccgatatccagtcaaaaatctgatgtgacataaaaaattttatttcgtgaacaaaacaggccctaaactgcctcgttgcgacggcgaagacgacacaggaaaaggcagcgtcgcaggcgttttttccggcgacgtgaaccccatccctcgcatcgtcacatggcacgcacctcctcaccaaattcaccatgcgcgcgagaaagggaataaacggaaagcctgaaaggacggcaaagcgaaggcgacggatcaggtccgtgttggaccgagcgtgtgtgcgtgatggtcgccatgaacgagacgacgtgagagggattggggaagaaacctcgtaagttcgtacagatctcatcgtgtcacggactcgcggttcgagcaaggtaggagtactagtaccagttgctgctagctcatgtgtacccggtgcatctggaacattcgagaaggaaccaatctacacatagtactacgtttctgcagtgatagcagcagtactccagtactaggagtacttgagtttctcatcaagaatcaaagcacgaggtgaagtgaagagagatttttttttcctcctctctctttgatgcagtggggaaccagtgcaggcagctgtgcagaggcagcacggcagtggtggcccaagaactagtgtgtggcactacactactagcaggaacatggccgggaacagggaggccttgaggcgtgtgaacggttggcaaaagatgggcagctaagcaagcacacaggcgcaagccggcaagcgtggaaaataccccgggcttttcccccgttctttttttttttttcccctcgccacttgctccgacaaacaaaaccgtgcagtatcaaagcaaattgctgctactataggtgttttgtactggaaattgttgcagtgtctcccatcagatttccagggtctggaaacagtatgggtctgatgaggacagcgaatggttagtgagctagtccactcctcatgattcaaatgcctacttctgtatggagagacattcagacatgccatgtccattttctcctttttttttcttttttttaacaggagagtagggctcccccattttaattaacagaaatgtaaagattacatgacaattttctcatgttgcttagtactccatccgttccataatataagggattttaagtttttgtttgcaacgtttgaccactcatcttattcaaattttttttgaaattattatagtacttgcttaccagcctccttgtttgctgccaagatttcaattttgaaacttaattttaaaattaattttaggatatttttaacatgtatctaaaagttttactgttattcgttttggcttataaccagttaatggccaaccgatgggatccattctacttctacacatatgcacatttctgtagctggcaaaaagatccgcatgacataacactcctcaagctctcaagaaaaaaaaaagacataacactcctcaatgctcgggaatgagatgcgcactcccatttgaagctatggattgcacacagcattcatttagcaatcaccttttattaaatgaaaagccgtttttcaggttccactaatgataaaggtggtctaaaaaaatagagatgatactagcggagctcactacttactattagtcaatgttaaaactaacatgtatagtagattggctataagtttatccttattttcttcatcctctctctttctctcaccatgaatttaatgcatatttcttagagtttgtgtacagttagctcttgtatgagagccaatactcttcacttttatttatctctttcttttacataagcatatagcatatagcttacttataaccctatccttgctcttagacggaatgtccaatgcacctcacctcaccacctgctgcaccgctgcacgtgaccctcctctccatgagagttttcacgcttctctctcgcctaaaccccccaaatttcgtatagtagcaagaaggcgagtggagatagatagaagcagcagcgaacaccaccgcgcttgtctctttctccgcgcctcctccccttttgatctccccctctctctccccctcatcctctgctcaagaaaagctcggattcttggcggtttcccccaccatttccccctcctcgatctgggcctcctccccgcaagcgtgcgcctcgcattcccaccgagcgtgcctacgtgctgcgctttgctgtgctgcgggaggatggagggtggggggagaggcggcggccccgtggtggcggcgctgctgctggccgcgctcctcctcgccgccgtcgctccggcctccgcgtcgtcgtaccccgcaagtgagtgaccacgcctgcagcctccccgggttcgttggcttcttcgctcctttgctgatggatgtgtgtgtgtgtgtgtgtgtttttttggggggttttgccattgcagaggtggtgagtgggttcctctccaacgcggcgtcgtcggtgatgaagcggctgtggtcgctcaaatccaccacgaagacaggtgattgctggaatctttctcgtgctcgtggcgtttctccccctgggttttggttgtttgaagcaatttttcgctctctgattgcgatggagcaggaagcggagggaagtcgatggtgaagtacgagggcgggtacaccgtggagacggtcttcgacgggagcaagctggggatcgagccctacgcggtggaggtcacccagggcggcgagctgctcgtcatggactccatgaacagcaacatctacaggatcgccctgccgctgtctcgatgtgagtgagcccctatcttcgctgccttcctaaattcggctggtggcaatgctagtgcccagtgggattctcgcgttctgccaattagatgcttgtctagtgtttggtaggggtgatgctgatgttgcgggttggttggtggtcatgaattttggtctgccttggtctatcgcttgattgcgatgtgtttgttagctttcagtttgcgattgcgatacttttttaagtgccttttggttggtttatttgtcttgattacccacaatttatgttcagccaacattttactatattgtagaagtggcgcaatctggttgagacaaccctttcaatagcctcatcaagatggcggcggcgctattgtattctagcattagaatgacaaccctgagacgttgatacttgaaagcctgactttcattaaacattgattaaacattgcgctttatggcttacacctaggacgatatcatgtgtgcatcttctgaggcaatgaaatggaaaatcatgtttcacgtagcagcaaattattttcagctacactgaatttcatccgatcttcgcatgtttcacatagcagcagattatttcagctacactgaatttcatccaatcttctgaaaatggaccaaacaatgcagatagcagaccaaagcttgtagctggttctccggaaggatttcctggtcatgttgatggaaggcctcgagaggccaggatgaaccatccaaagggatttacggtggacggcaggggtaacatttatgtggctgatgctatgaacatggctattagaaagatcagtgacacaggtaagctaaaatgtcctgtggtgggggtatttgcacatggttttgtctgttccctaagcatcctatgtctgccttttggtttttgctgggcctgtccaacatgtatttagcacttgcatccaaagtaacagatgagaagagtaaaccagccaggcaatatgaagataatatatttagtttgaggaaagcaaatctgcttagaccattatctctggaaaactgcaaggcataaatcttaattttgttcaaagcatttatttctttccaaacttatactcaggaaaaagatcctgacaacatttgctgatacatagacttgatgttaactgagtttgatttcttggtaaaattagaaaggcatgctgccatcatcatgcacatgtttgtctaatttgtagtaaacgggaaggtcttgacttggaagtgttctgacatttaggggttacaactattgctggggggaaatcaagcagaggagggcatgttgatggaccaagtgatgatgcaaaattttctactgattttgaagtccgctatattggcagtagctgctcccttttggtgattgacagaggaaaccaagcgattcgggagattcaactcaacttcgatgactgtgtatatcagtatgaagctggttttcctctaggtatatcttcatatcataccctgttcttgtttctatagactattattacttgacccataaaacctgatgttgaagcattcaatctgagtagatgtttaaatttagtttgtatctgagggaatgttgacctgtacaatacttgcaagttgcaaataactaattacatgtattttgtatactgacaggagttgcggtgcttcttgctgctgcgttctttggctacatgctcgcgttgctccaacgcagggtattagggatggtgtcaacagaagatgtaagtactaagtctcaacatgacagaatttaattggtagattgtcagagttagataataaggcaagggttaaagtggaccacagacctgctgtaaccgagcaggccagcacatgaatatgttgccatcagtcttttgttactcctggtactaatgtccatcagaccatcacccactggccccagtctgcttcctgcttccttactatgtccacacctaccccgattttaccgtctcatgtgaaaacacactgattgagtgttcttagtggaattggtgggtaaatgctagcagtagaagttttggagtatagttgctaattccggttaacattacacagaacagaaacttctacatatctagactagctgtaaaattacagctactacttgtttagtgatttgctcattgtgatagttgtataacacacacacacacacgccccctaaaaaaaccctagtaattctttatttttgtgctagctttctcatggtgctaggcttgacaagattagtacttgtccgcatacactatctcatgtgttcttgcagacaactggagctacattgttttgaattcaatttttaccacgcaggaacctgagactcagactccactaaaagctagcattgcaagcatccctccataccagaagccgctaaaacaatctgtccgtccaccgttaatcccaaatgaggatgaatctgagaaacaagaggttgaagaggggttctttacctcaatcggtaaactcatcgtgggagccaaatcgtctgttgcagagatagttggtgcagccttttctagaaagaagcgtttaaacattcatcagcagcaggctagagtacgctcttggccggttcaagaaagctacgccatcccgcgggatgagacgcctccaccactggatacaagaactccaaccccacgcaagaactatgctttcatgtcaaaggagcccgaaaagatccaccacatccggcatggtcggtctcagttcaatggttggaacggagacgcacctcagcagcagcagcaacagcagcagcagcagcaaatacatcaccagcagtacttacagcatcataggcagtattcatcaggaccgcaaactttctatgagccaagctgtgaggcaacaaacgagattgtctttggagccgtgcaggaggtagacagcaagcgccgcgctgtggagatcaaacccatgaaccatggcgatccgcagtatgaccaagatgggttgcggcaccgcagcagctacaccggttacagcaacaactggtagatggccagatgtccttttttgcagctacatgattagatttactgctcgttaagttattttgccgtcgtcgaatttgtactgcctgaaacagataaatagaaattcaggaagtaccggtgatatgggcaaagtcgaaagctggtttttgctggatgaacgtcgtgatcttagacctctactgatatatatatctatgtaaatggaatgtgtttttcgcgtctgaatcttttcgcccgactgcctgaacctgttcaattgttcgttctggaggcattgtgacccattttcgttgatgaacgccgaacgttggtcgttatgcatcgtcattctccggtcgcgactcgcgactgcctcagcgtctggagtccccggtagatcactgcgatacatccatggctccatacactacacacccgttactgtgcgcggtgtgccctcctgcccagccgtgccattgcgccattccctgcatgagcgggctaaactgagtttgatatgattctgaaagcgaggggagtggaaactggaaaagtgtccctcgttacttcatctaccagcacggccgggcactacatgtaatcgaatggcccgatacgaaggtgcaagtgttctccatggactgaaatatggaccgggaagcacatgtgttctagtagtattctacacagagaaagaaacgtacggagtacatttgtataacagctgtgctgcatatgatcaggactccaggagacacggcacactcacagaccaagcaatacattggtacttttactctgaaatccaggtacagcatacctgaaacagtgggctcataaatgaaaagagggagatacagcaaccgacaatctagctcagctccaccagctaatgcatccatcatattgcatgaatttcccacattacaatggtatcacaatctaattttgtcgcaatttgaaggttgtctcaacctttagctcccaataatcagtcatctcttcctcatggtaaactgagtgagagtagcagcagtaaaaactcatttccgcctatccttggctcttttgagtgttttcttgcccttgttcctccacttctggctgcctcctggagtgcggctctcctgaatttcccttactttgcgcatcctgcattgcagtacccgatgtcagaaaagggaacataagtatttgctatcaggcaattctaacatcaattctcaggcagtcctaacaagaaatctgattatagtttacagtataatcatgttttggtatgagataaaaatacggtgagcttacctgtagttcttaagatgttgatcagataagagctcatcaaccaatgttgttttgcgctccctctttgtcagcctacttgagaagaactcagatgcaggctcaataactgtaccaacctataccattacagaaattttcatcatataagttgattatgagcagccataagctgacatatgacctaaaaaatgctgcccagtatgactacttacttggaagtatttcggaagggccttggattttcctgccctcttgaagtgtctttttgggtccattacatgtctcagctgcaagatggatggaaaaagagaaacaggtcaattacaatatagcacaagcgcagagccaactttatactgcagtgtgttactttgatctcaactctcaaataaaacagttcatcagatggaaatattatcacattactctccaaagaaggtgtagaacatggatcctagttctcttaaactacagactagtagttaatgtttttcacattctactgattcaagaaaggaaaattcttatattcttcttaaggaactattatgaaagtcttttagaaaggtgaattatctaaagtttaagaaaagtacagaacaaacacacaaggacaagatgccaattatgtacagttgcgctgttgaatgatgctgtcagttgctctaccacggttaaattctcaatttttcagctatatatattccttcccacagaatcgatgttagtaactccatacctgcaaaatctcaagatctttcttcaactcaggagtgatggtgggagccggcatgtcgaacctgtaaacccaaagcagcagatcataagaactcatataagctttcgtcccttgtattgctggtaatcaagaaacccggacacattcaaagtgcgagcaactcaccagcccttgccggaggtgtccttgacgttcttcctggccagcttgttggccttcctcgggtccctcggtggcacgaagagcccgtcgacgagctcgctcgcgggcttccagagcgacccctgcgctctgctagagctggctcccgtgtccttcttcccgccgctggtcgtcggcagggagggcagcttgggcgcccacgacaggccaatcggcgccgcctccgccatcgctcccgtccttcacctcaactcagatacctatcccaactcctgcctcaacgttgctcgagtacgcgccggcggtggcggtggcggtggcggtggagagagaggaaagcggcgaggcggcggcggcgtgagagggagtctgcaatggcgaagggagtagggctaaccgagaaggaactaggaagaagtagaggagcttgggccgttggactggggccctcgaaagaaatttcatgggcctcattgggttgaactttcaacggactgggccggtgtgaactacgtacgtggctacggacctgtttggagagtttccagcagccgtagcttctcacataattagaagttctactaaacatttccggcacagtttctctcataataaaaaactttaccagtctagctttttatctaaattatgagaagatatagttataaaatccaaaaaaacaaactataagttagattccgagaagatgtagttatagaataaaaaaaataaactaaaagtttagaagtggtttctatagattctgaaaagttagctaccaatctactgttttttagaattttaagctccgctcgacgtcgccggccgcggcggcagcaggcagcctacgcgtcgctctcgtcgtcgtcgtcgtcgtcgtcgagcagccgaataattccggcgccgcgctgtgacgttcccccgtgtgtggccagacgacaccgtcgcgtctcggcgtcacgcaaaaacggaagccgcgaacgcgagtgcaaaagatttctctggagcggcgcagcgagcgagcgagcgagcaagaggcgagagcgcgcgaaagagaccgtgcgcgtgcggtgcgtccccggaacggacggacgaacgggtgggatcaggagagagagagagaaagcgcgcgaacgacacgaaccaaggaatccgagtcgcaaagcaacgagctcccaaattaaattgagccccgaggtgagcggggtgcggtggtccgaactcccggcgtacgtccttcctatcctacgcgcgcgcgcgtcgttgcatgcagcaggcagccacgctcgtcgtcgtgacgacgcagggtcgcgccgccgcggcgccatggggacgctgccggtcaccatgccgcctccgcagtcgccggagctgcggtcgctgcggtcgacgctggaccagcgcggcgagctgagggccccgctgctctcgttcgactggggcttccccggcgggatcgcccgctgggagggggaggagggtcgcctccggcgggcggcgggcgccgcgcgcgccgcggccacggagatgtgggcgttcgcgcggaaggacccgcggaagcccgtgttcgcggccaaggtggcgacggcgctcgcgctcatcacgctgctcgtgttcctccgcgagcccaccgacctcgccaaccacgccgtctgggccatcctcaccgtcgtcgtcgtcttcgagttcagcatcggtgcgtgttgtttttgttcctcgccaccgcgcgcgtgccgcgatcatcgatgcgactattgatttctctcgcttcttcagaacattttttttaagacgcttctaatttaatctaccaatagcatgctgttgtcctagctgacgagcatatatacgaaacactacagattactaccaaaattttatcatgcaatcacaattaacagatcaccctttccttcgatgctacaattataaactcagaattctttttttttaaggaaaggcgtgaaactcagaattcttttaacccgttcaataactaattcggtttcttgttgcacaggtgcaaccttgagcaaagggctcaacaggggattgggaactcttactgcaggagggtttgctctagcagtttctgaattgtcctcaagcatgggaaattttggcaacgtgattctgatcatatgcacgtttgttgtcggtgagtacatacagatactgaaatcgttctgcacatgatgaatatatgattgattataatatatgtttgagcgtggctgattcatgttcttcttgatttgtttagcattcggtgcgaccttgacaaagctgcaccccaagatgaagccttacgagtatggatttcgtgtcttcttgctgacattctgctatgtcacggtctctggatacaacacggggaaattcatcgcaacggctataagcagatttttactgattgccattggcgccgctgtcagtcttgcgctcaatattggcatacatccaatctgggcaggggaggatctgcacaatttagtggcgaagaattttgatggcgtcgcaaaatcgttagaaggtatgtccatccaatgccaacattgtcacaatcgtgttacattgcatagatacagtcatacaataggcttgatttgtagacagaatttcaaaaccttctttgattgcctgtcccaggatgcgttgatggatatctgaaatgcatggagtatgaaagagttccatctacgatactgacgtaccaagcttctgatgatgatcatctgtatagcgggtgcagggcagctgttgaatcatcagctcaagaggaagccctggtatgttcttgcccaaaatgaagttcttttttttatatcttttctcgtatatgttaacacaggtgatttccctgtgtttgcagttaggatttgctatctgggaaccaccacatggcccttacaaaatgatgaaatatccttggatgaactacactaaagttggtggagcattgaggcattgctctttttctgtcatggcactacatgggtgcattctctcggagattcaggtttgtgcatcccaagcaagcaaacagatttactgaattctgttatttccccttttgcaagagttagcactgaatttcctaaccaaaatttccgattaaacttaggcgccaccggagagcagacaggttttcagcgcagagctccatagggttggccaagaaggcgccaaagtgttgcgcgagctggggcacagggttaaaacgatgacaagactaagctctcaaaacattctatcagaagtccacttcgcagctgaacagctgcagaagaagatcgaccagaagtcttacctcctcgtcaacacggagaaatggcaagctctcatcaggcgccatggaggaggagccaaggatggtgggcttgttccggggcgccgcgccattgccagccccggtgcagtgcacaagtccagcagcttcgcctcgagcacgtcccactccagcttaaattcggcacccaggaccgacgcatcgtacaagccgcagccgccatggccgatcaggcaaccgtccttccacccgagcttgccgttcgaagctgcggcggcggaggcgagaacctacgagagcgcgagcgcgctgtcgctggccacgttcgcgtctcttctgatcgagttcgttgctcggctcaggagcctcgttgatgcgttcgaagagctgagtgaaagcgccaacttcaaggaggaccccgtggaggagccctccgcgatcagcagggagaatggaggtgttttgtacagattacgcaggttttttgggcttgaagagttgaggcagagggcaggggagccctaaccagttttgtacgagtggaaatgggtagccagatgtatagatatattaacccagcttaggtgtgtgctagaatcgttttcgctgacagtgaagatgaccggacatgtaggagatgtcgatatgtacaactgacctactcacctacatgaggatttcgtttctcagggggtgtttgggtgagagggaccctctcacccaaacaccccctagtcatacttggttgcaagtatacgcatttctagttactgttgcagatttttgcaatgaatgttgaaaatatgtcacctgcattgaattatagatgttgagcatcatgtcatagccatatctatgagtcatccttgacaaaaagttgtaaccatatggtctaagcttgtcaaacctagatcgtttaagctgaacgaattatctgatctcgtcagttagacagctacaaatttctacacaatctagactttattatagtcttaataacgataatgattattatatctgaaactccattaatccgaatatacatacactgcttcttgggtatacaacaccctatattacaaaaagtacccaagtatacaacaaacaaccaggatttatactatggactgtagaggagatagggcggcacataacaggatatgctattcgtaagcagctctattggtagtctctatgtatcatttacatatgtttattgcacaatacttgttagaggaagaagggaaagcccttttgtgtttgtggcttggtgcagtctgaattagtccatccaatctgcctctgttgattgtcatacacaaccaacttgccgcgcagagcattatctatatggaaaatcagggaaggattattccaatgtttgacaaaaccgaccatctcacgatgcatctagaattgcgaatcgaggtaaaattttgcaagtgctaagatgaagctcatctatacctccgactattactgttgacccatgatcgatgtcctttccattgaggaatcccaggcagacattgcctttatcctgggaaatccagaaagaaaaacagatggagtaattttagcacagaactcaagttagaggggccgatagatgataaaagttctaacagtatgaggaaagcatcaaaacttacactaatgatcaagtaattatcaggaagaatggtgaatgttctgggcattacaaaccatcttttcccaaaatgaagattcaagggcttgaagagctgtttgacatcttccaaatacctggatatcataagatcacaaggaaaaatgaatagttcctttttctggagagttgcgtgttgaacttcatcagcaaaggcaatctattggagcgctatgattactccattgttttacctcacaggaaaatcagttgccaagcataaaggtaatgtacgatctgaactatcttggacaaaatttgggtaggcatatttgatctgccaaggtcaaggagaaaaggtaagtcaaaatgtggttgaatagttgaacccttttaaacaattaagaaaaatactcacagctgcaataaggtttttgtatatttcatctgggaggtatgtatatgaacttccgctgtcaaaaatcacttgaactgagttccctgatgccccacgcatactgagctgttggtccccataatataccttttgggcttctgtgtggaacaagttactgatagtataaaaagatcattagggagagtgaaaagaatttaccagattctttttttcaggatcattgcaatgtgcatacagaaacttttgcttaagaatacggagaacaggaaaaaagtggccactggccagggaaaacatgcaattaaacttccaaagaacaggacttactctggagcacttcggataggtgttgatgtcattccccatctgggtacatagtcatcccctagaaacatatatcctccaccatttggatctctagtgatacaatgaccaaaaacattggaaataatgccttggttggccagctgactgggaaggcttattcctgcactactaagaccaaggatcccatcggtcttagctggtgaggccaaaagctggccttgctgatcatatgcacacctacatttgtaggacatcaagcagtcagaatgtcagatatttatatgatttgacaccatttgtcataacatatagtctgtcggctacatatcctctcttaaaaggtttgaacatacccaaacacaaaatctagtttttcccttccaccattagtagtgataatatgcatatcatccctagcaaggacacccatggaggagcttcgatcagcatattcaatctcataatcacattgcttgcatgtttcacagtagttctggttgccttgcaactcttgacataataaatccttgggagggactatcttttcttttgccggcttatataaaggatgaggtccctgcgagtacaacacatgttcatcagataaaaaaacaacagcattgaaaagaatatgaggctaatcacaaaatgacagaaatattgttgtattagttttgttttactaacaacatatttatagtagacaagtagagatcctagcatagtctagaacaatttgttaaggatgttgttggaagttggaactagaatggaaattgctcatgtttagttgcatactttggcacagtttgtgcatggtgcatcacactggatccatgtcaaatcgcttccagtatcaacatcaagaaaataaggtctgggtggattgcccacaaaaatagatgtgtagtactgcctgcattgcatttggggtacaatgatattagcaggtgtaagatgacattaacccaaatagttcaagtataacatcccttgcatcatataccgaagactaaggccagaataacaactatagagatcagtttggtaaagggtctaaccttaactaaaattgttaaattcacaaaaataacagtccatgtataacaagtacaactataaactaagacatcataacggattttgccgtataattcaagagaagtactcctataagagatcacttggtgaatatccccaacccagatcaacgaaacactctcgggctgcatttgatcatcaacatgattaaatcccctctctctaaccaaactaagatactctcgggctgcatttgatcatcaacatgattaaatccccactctctaaccaaactaagatgagaaataaatttctcttgaatcataagataaagctgcaagagtgacgctcaaatcaaaatccgattcctgaacaattatacgcacccatcagggaagacattccccttgatcgggagcagagccgtcgagttcgtccccgccgcagctgccttcttgacctccaatttgttcctagatttcctgccgacgccccctccgccgtcattatcgaatcttctggccgcgagcttgatgtctccaaactcccgcagcgcgcgcccctgccgtgccttggggtacagcggcagcaggaacgacttggtctcgttcctctcattctgcgcctcctcctgcatccccaagaactggacggccacgtccgagtagaaggagtagtatgccgcgacggcgagcgccccgagaacgagcaccatcgccgccgcccgccgcggcgagaacccccgcctcgatcgcctagcctccgcccccgcccccgcccccgcgggcactagagcccgcgtcggcagatgcgtcggcggaggcgtaggcgggggcggggtgacgtcgtcgtcggtgtaggtgaacgcggtgatggtcttgcccttggagggctggtccgggggagggagggtgatgatgaccacgccatggagctgcggcggatccggcgccgccgggggcggtgggggaggcggcggcggcggcatcaccgtcgagatcccggcggcgctccggcgaggtcagagagggggagccatgggaggcaagtggcgtctgaaaccggctaagggtaggggacggtggttttgctgtgcggaggacttgtgctctcactgtgattggcccattgacttgacttttccgccaaagtggtaaagattaaataattataatttcgcggataattctacgggctgtgccgtgtgccgtgtgccgtgtgcgacagtgcaacgcggataattctcaaagcaaaggctaataatacctatatacttcctccgttttaaaatatttgacacagttagacttttagtacgtgtttgatcattcgtcttattcaaaaaatttaattaattatttattcttttcatatcatttgattcattgttaaatatatcttcatgtacacatatagttttacatatttcacaaattttacagcttatctctcagctcacttatatattagttaacttttcactataaatatatggtcacctgtctatctcacagattttattgattcatgtgcctaagccggctgtaaacttatagcccgtttctcatctctctcctctcatctcctctctcatccacctctcacttaggtccctcaaatttgttgcttagcctgaactttgtccctaaccgtaataccaaatatgatgcgtccttcaactccacaaaccagtacaaataagatatcaaggcggtttcggctaatgtgacgtctacgcgacattaacgtggctcagaaaaattgagacccacatatcagtgagtgtccggttaaaaataaaaaaatagcagtgtcggcagccaacccatctttctcctatctctcccctcttccttctctcttccctatctctctctaggccaggagtgggcggtgggcaacagaggctaggagacgggcagcggatggcaggcaaagttgcagtggctatagtgggttcgaagggcggcggtcatcctcctctctccctctcttcatcatctctttataggttgagagactggcaacgagtgacgggcaacagaggtcgagaggcaggcgatgggtgacgagtggcagatgtgcttagagctccaccgccatcaccgccgtggacaaccagaagtgagagctccacctcctcgaactaggactaaagttcgtgggacacgtggaccagcaccagtgtcatggtggcacgcgcgaggctttccatggcaccttgaaggaccggtcggggatgtccctatggtgaaggtgagacaccacgttgcattgctgcccaaaggaggtgcttgaatggctagaggggcatgaaccaagggctgaccccgcaaaaggcgttgttgagcacctcgtcatcgcgccactgcccttgtctcggaggtgcagtagcagcgcgatggcaccgatgagggactccccatagaagaagcagtgagcggttgttgacgaaaaaatcgaacacaccggcctgggagatctgcttagctcctgtgcaggtccaaagattaatgagatacggatgtgccagtcagtttaatcctgtaactgacaagatttgcaaataatagatcaaacagccgatcaactgacaagctgatggagtagttccagccgatagtcgataatagccgatgccgataccagccgatagcgatagggtttaagcaatcggctatatgtccaatgtagataatgatataaaggcaatcggctgatgataatataatatagcaatataatccagtagaaaccaatcggctaacaatatgaaatagtagaacaaatattgatccgaaggttaaagcacacatcggttagaggtccgatgtcataagatccacaagattagattaaacagtgaaacctttgttgccatcggctaaatccaacttatatgtatatgcaatccctacaagccgatgcaacgtccagataacttatcggctagcacctcgataaaacattagcatgaacctatcggcttaacaagacttatattatcaacaacaatctagtagatcgaacctaaccgatgcagcacgagattgtatatgataatctaatactcgatgagccgatagatctgtctaatgtgatggatataacaaatctatttagaacaatattatgattgtagagatatatcggctaagacaggagatcagacctaaccgagacagtcccaactaaaccgatgcgtctctaaacacaatgcaattagagatagaattgagatatcaggtaggcaaatatatcaaccaaaccaaagtgatccaagagatcgaatcgatgcagccttgaacaacaccaacgtagccgacagattcaccagggcccgacagaacgtaggacttaccccttcgctggagatcgaaagtcgatgcagccctgcgtcaggtgcccaagttccaccggaagataagtaaaaacctcaaggaagagggtggcgatgcgccgagagtattattgatcgatagattgatagattacaatgacctcgggtgtacatatttatacccatagggagatactagtccttgtcggacaagaaagaaactaaaaaggaaaagataaagtccttatcggacactaaacgcactttcctaaagataaaaggaaactaacaaattatgcctaattaatagataactgtcatgtcgcatccttcttgaactcgaactcttctagataagcttcctttgattgatccgactccaccaagaacacgatatcgtagtgacttgactcccatcggctgattctagaactttgaagccgacactgactctaaaccgatggtaactttgggcttaccaaatttcactgttaacagcggtgcgtgggtattgaacacgggaggggcgaacgcggcctcacagtccttgagcatgagtacaatgtccgtgtacggtttgtggtcctagagccctttggagaagccatgccaggtggtcgatggtggcgacagtgaaaccgaccttggcgaggtacaccactgtgagctgcaccatccaaatggactcccccgtaaagccgtctaccactcacttggcctccatcgctctctgctcgctcccagcctagagagggatagggaagagaggttaggaggagagagagagagagaggagaaggaagatgggtattactatttttaaccggacactcattgacacatggggtctacggtattttctgactaagtaccacatcaatgccatgttagctgaaaccgccgctcaaaccgtcttgggactttatttgcactggttttgggagttgagggacacatcatatctggtattgcggtttagggatgaatagtagacttgcgacaacttgagggacctaagtgaacttattccttccaatcaagcacttcctggttaggtgggccaaatattaggcctgctgggcttacgcctcaaccggcccatttagaatacgagatatttcgctcgcggcccacgcggtgctcgtcgtcgtctcctggctagccggtaaccagccactcacgcagactcgaggccaccactgggaggagaagatggacgccgcccgcgcctccctcctcttggccggcggcctcgccgtatccacctccacctccgccgtcgccactgccgcccaaaccgtctcgattcctcacctatcgccgcacacccgccgaaggcgacagcgccgcttcctccgcctggcctccgctgcggcgtcgtctcccccgccgctccccgctgcttcggcgcagccgcattgctctaggtgggtcgtggtgatggagagaccccccgcgccagcgggaggcggcgaggtgtcccgtgcggaggccgtcgaccactacgtcgccacactggccagggtattggggaggtaagtggtgggaggctgctttttttttttttttttttttttttgcccccttgcgcactttctgaggttgaaaggatcgtgcagccaggaggaagcacagatgcgcatatacgatgcttcgtgggatgggagctacgagttcagctgcgagatcgacgatgaagcgtcaagggaccttgcgagtatgttgttgaatcctcggtcaagtcaattgtgcactttaatgagctaactttgcctcgtgcaattttgcatgaaaatgtttgaattcttgtggtagatgttttctgctactcatataacctgagcttgtcatttgtgttagttgcttatgctcttccaatgtacagaaatgcccggggtattagctgttaagccagatacggataaggttgatatgtcagagaaggataatcatggctcaggcctctcagcagctaacctaggaaatttcagtgatgctgtttccaatcactcttcttctagtggggaaaatgagttttggcttgtgcgaatggagaagcctggggttgaagttgtgacaaaggcacaaatggtggatcattatacccaaaccctcatgaaagtgttggggaagtatgtagcctcatcatcaaccttgcttctattttgctatatatgccctgtggatgatacaactgttctttcttcccaatttctagtgaaaaggatgcacaagtcagcatatatcacatttcatgggagagggattatggcttctgctgtcacattgacgaagaatgtgccaaggagctagctggttagcaacttttgttgtccactccttaatatgcatattatatgactattctatttctaaatttctataggaaactatatatttatttagacgcgctgacattataagtttgcacaccagatgtttctggagtgttatctgttcaaccggacacaaattttggatccgacaacaaaaattacaaaggtttgactattgtattctgtttctcatttcatatatttatatttatattgtagtcctgaatcctatcatcaaaatcgtgcctttttgaatgtcatgtgccacatcaatgccttgatttttgttccaacgttatttttttctgaaatgaatcattccaataatatatttcctgctaagaagcaaaatgctttgttcccgactcctagccacctaagagggtggcaaaaatactactttattcatgcctctaacctgaactagaatggtagatatcctatatcattaaattttgatgctactgttaaatattcctggggtcttaatttggtatgaacatgttgattctgttacatcttgtactcactggcatattctcccctgaaaacatacctagtaggccttgcaggtagtgtattcattcatagtgctaaggaataatgaataaaacacccacatcgctttttatgatttcaggtgatgacagcttcaaatcgtctgaagctactcaggctgaagtcaaaactaaaaggctttttgttacaggtaaagtcatcatgtactacacatgaatttcagtgtgtttatctaatcatttatcatttacatgagaatgctatcttctttgtcctggagtaatatattttgtgtcctccctattgaatcgctatgtttttatgcccaatttttattattcagtggataggtaggtagtctaaattagacaataagaacctatgtgagggatagtagttctaaaatgtgaatgactaaacccccactgagaaatattggttagatgcaaagcatatgaaaataagtgtcctccatcagatttcaagtgtaacaagtcagacgagaatgggagatgaaaatcttctgttgtttttgctctcatctgtgagacaagcaacactgcacaacaaaagcatacactgcaatagaagatcagttatattttaatcctgttttacttattttaaatctggtgtgatatttctaatttctggcaggtctttcattttatacatctgagaaaactttgcgggctgcctttgagccttttggtgaactagttgaaggtttgttctgctaatacagaaatgctcgtacatctccattcagatcttttcgtttgagatattgagtttgatccattattaaattattacagtgaagataataatggacaagatatcaaaaagatcaaaagggtatgctttcatagaatacaccacagaagaagctggaggtgctgctctgaaagcaatgaacggacaggtaacctgacaaaattctctttactggtaggctggtaatatcttcaagacattcatttatctctcgagcttatatatacgcgtcaatttacagataataaatggctggatgatagttgtcgatgttgctaaacatagatcgagggaccgtcaacccccgtatagtgcatcaggtagatccaatcaagtgcttcgatcgcgttatcatactggatgaacaaagcatgacacctagagattagacacaagattagcagtgagtacgaagtagaaaccatagttttccggtggtgttgtatttttgcgtggcctgctattctaatgtttccaagagatgatagcgggctacagattccataagtttagtaatatctaacatgtactggattgatgcaatatcttttgatactgcattggtaatatgagcttgaatagataatctcatgtaacatatttctatcaacaaataatgtgaaaaaaagagatgtgattaatacaaacagacaattccctgaattaaatttcaggaagggcaagtgtttcaggttcacttccagctgataccaaattaactttcaaatcttccaacatctgatagatatcttcgctttctgtgtgtaacttgtctgcactgacaaaggaatgtacacgaccatctaactcgatccagctaagcccaggctgcttcattaccccatactcctccatcttcctcctcgttctcttcaagtcttcccattgtccagctcgtgcatatgtgttggataacaagacataggagctgccatgtcttggctctgcgtgtgccagctttcgagcagcaacctctgccatctcgacattgccatggctctgacaggcagctagaagtgagctccagatcacaagacccggatcttccggtagactgctggcgagttcgaaggcttcttccaagaacccggcacggccgagaagatctatcaagcaaccatagtgctgcatcgtcgacttgatgcccatgctcctcattaggttgaagtacttgaagccttcgttgactaggcccccatggctacaagcattcaggacggccaagaaggtgactccgttaggctcaatgcccaattgcctcatctcggtgaacaatctcagcgccatctctgggtgaccatgtgctgcgaaaccaccaatcacagaggtccactgctccacattcttgctggcgacacttgagaagcaccggaaggcgtcgcccatgcttccgcaccttgtgtacatgttgatcagagcaacaccaagagcaccatccagtgagaactcccgccgaattacgtacccgtgagcgcaccttccaattccaagcacacccatatcgcgaacagctgatacaaagccgaccatcgtggcctcgtccggtgccaaaccataaaccaccgtcatctcggcaaacaaatccactgcctcctgaacccaaccatgcctcacaaaaccagcaatgacagtgttccaggaaaccacgttccgctccggcatttccacaaacacctcccaggcagcatccaagtcgctggctcgcacaatcccatcaagaagcacgttccacgacaccaccgtcttcaccggcattccatcgaacatcttccgcgcatcgcccaggcggccaagccgcgcgtagacacgcacaagggaggtggacgcgtagacgccggagacggacggcgggtcgccggacttgacgaggagggcgtggatctgctcggcctcggccgccgcggagggcagcagccgcgcgcaggccgcgagcgcgggcaccagcgcggggtttgcgtggagggcgcggccgtcgaggtggtgccggcggaaggcgcggagagcggcgtcccccgagaacgcagcgcggcatcggagggcggcgccattcgaggcccgtttggagaagggagatttcggcgggagaccggaagtggcgggggagaggagcgagcaacccgaggagctcatggaagagattatctctcatgctccgctagtattgcgaaggtgaaaaaaaatacagtgcggatccagcaggtcggattcgtcagccgatttttgcaaagataattcaagcatgaccatagcagagcagtgacggcagcgctggctgctcggggaagaagaagagtaacgacgctgataagggggcggaaggctgaagcggtaggcacgtatgtggcccagttcggcacttgggccatctctcatcttccccacagcttgtcttggcccaatactatcagctcattcggctagggcagtgtactaggctgcaggagtcgggacgggaggcttgcgatgcaagcggcggcggcggcggccggcgggggaaccagtcgggcagggagggcccggcaaagcaggcgggggcggcgggagcacggcacgaccatggtgacttccgtccgaggcagttggatgcagcattaccgatgtgagtcttgctatatattgctacagtgagtaaggctgcgttctatacctatcatggttcccaattttcctccctcgtttttcgcaagcacgctttttaaactgctaaacagtgtgttttttttaaaaaaatttctataagaaagttgctaaaaaatcatattaatctatttttaaaaaaaaattagcaaatacttaattaatcacgcgctaatcgctgtttcgttttccgtgccagccgaacacagcctaaataggggctgctattttatactcccccgttctaaaacatattacatggctgacttttcgcataaagtttaaccattcattttattttattttaagctttatgtgaaaaatcaagggtgtatacttacctaattttgtttcaactcttaacgtacctaagaaagacgaacccctgccctccaccatttagttaatgtgtatacttacatcgttatttggagaccattgtgaatcctcttttcatgatacctgagccttttgcttccattagtgctatatcttgtgtttgtttaagtttagcctatattcactaccaactcccctatcttccctatatgttagttatgtgcgttagccagattaaccggaaagctacttcatcaatataagaagttttagcgctgaaaacaagtattaagaaagttcttgaaattagataggaaaggttgtaattggttgagaagagaaagtaggtgaataaattaaaaggtggaatattgtgattagtcaagaagagaatgtagataaaaaagttgttatattttgaaacaaattttgaatactataagttattatattttgagacggagattagtttctcttttaaaaatgcagtcatcctacttccttctccttctcatgtatgcaggagttcatgcactccttactcaatccacccaacccgaccaatccctaattatataggtttagcccttgttttatcttcaattcacccaactacaaattctcaattataagatcttgcccatcgtaaagcaaaggcatattattagtttgataaaaaaaccgatggttagtttacctatattttagtgccctgtaatgtatgaatccaacagtgtacacgatacaaatatcatattaataaggctgagttcggatgtggtgttgggcttgaattttgatggcatgtgaaatgagataaaccattagcacataattaatcgaatattaattactataaatttgaaattatatttatttatatttttaaaaacttctctatagaaaaattttgcacaaaacaataccatttaacagtttcagaaacatgcttacggatgacgagaaagttgttgtagctggttactctatcgataccaaactctacttaaatcagagttaaacttgtttacctagtaccatatcttgtatatcattatctacctagtactttgttaaaatatcgatacataattacgtgagtgacattgtttacattggtcttgatacagaagaggtccactacgcaacaaccggagcacaatagtacatttttagcaaaggtagagtagtgtaattaacaagttaccactacaataattatcattatcttggttctatgaagagaccttaattgcaaagctacacacatggcaattcgcaaaaagcaagtgaccaccagtgctcccggttggccacggtgcccttgtcatccatcccaagaacctttcctgacaggtgttgtttcatcataaggcaatcattgacacttgtccggccactttgtggatgaaaatgcgaggccacttttgcaggccagggaatgcatggatcgcgtggtctcgatcggctttggtccttcgctttcctcaaagtaaaaaaacctcggaacttggaaattagaaaggacattgaggttagcatcgaagcgagcacaagtgcactaggattggtccggctaaccatcgtaccacgtgggctcgccaaacaaaagagaggcagctccggagcacaaagccggtgtgtgatctcccgtctgatatatagttcatgatgcatgaacatgcgcgcaacatgcatggatattatccagtattccagtacagtatcacacattgagtcatcgagaagataaaagaaaaatatgggcctgattggtttggagagagagtttaaccttactgagatatcagtaagccaaaatctgggtgtcgtcaaaatttcagtaaaaattaaatcggtaaccttattgaagtattcttaagctaaaatgtcactagtacacaaaagatttttatggacgccggccccggtcgatttcagacgaatcataaatggcgtcgtctggcgactgtatcccacacgggaaaatgcattatcccatgcgggcgttttaatccgaccgcacgggataatatccggtgcggctccttaagaggatcgcacggaaaaatcaatttttacgtgcgggcatattaaatagatcgcatgcgaaaatacctctccctctcacccacttcaaaattttcactcctcctctcccttcctttccttttttattttcactcctctctctctctcccttccctcctctctgtctctttttccatctctttctcttctcctctactctcctctccgcgggaccggacgggcgcgacggcgagtggctcggcagacggcgtggtgagtggcgagggcacggcggcgaggggtgacggcaaccagcctccacccggatccggcggcggcggccgtctcctgctcggatctggcggcggtggccgtccccgcccagatctggcggcggttggcaggctcgacggcggcagctaggagcggtgggctcgagagcggcagctggtcacgccgacggcggcgcgacgacgacgggagctgcgacgggcgattctagggttagggttagtttttttttattttttgattttatttttttttgctgttttttttgtgcgtgcgggcggtataacttgaccgcacgggataatcgattatcccgtgcggttgggctgtccgcacgtgaaaattttgattttcgcagagccctgggtgtagacgggcactacctccgcacggaaaattagattttgaccgcacggaaaaatggattttgtactagtgtgtacaattaattttacaaaggtcgtttaggttgacgtttgatttgataccagctggagtacaaaaacatgtgtgtattacgaacattttttacataatgtttgtttatcactaccaaattatgccggtaatgtctcgagccaaagtccaagtacagaatgctccaacgttgaagtatgagccccgtagctagactagccattgcttctccacgagactaccaagcactgatcggagtgaattcaatttaaagtacaagtgaagtatgaaaaaaaatacttaagtctttttaggagtggatatctagtaaactaatgtatcacaaaatttgtgaagtttgtgataaagaaagtatttggttaatggaatgtgcaagggccatgccgcccttccttttcccccaaaccccaaatgataaagaacggcatagcagtgttgttaatttactgatcatataacgacatctttcgacatcctaactaaattaatctttcccctcaccaaaagcccagcccctgacaaagtgcctatatattaacgtgccaaagcaatagtagctacttgaaatgggcataaacatcagaaaccgtttgtatttgtagaatcagcgtactactattataagatagacacgtacgccctttgttacaaacttacatgggagcacaatcttttaaggaaagaaattaaaagtagttcatggcatggttataatatgagatagctatagactgaaacgatgtcgacatctcccatgttagaattagaccctcccatgttgccaagggacgcatcctcatgatgtgtctgtgcaggtaagcaacagacaagagctggctaaacatattctgaaatcttataaggtgattgtacttttatatgcccaccttttcaatatataatgaatagtatcatattactacaagagcggatttccaaaccaatgggcaaactaattgtgcaatggctccgtttttatatatataatgaccatatatacatgtcactgacatacatgtacagtttcaatgatttaggtcatggtctgtaattatatatatcaacaagctagaaagcaaaacacccacgtcaaaaactttcccataagaaatttcattataaaaagacgaatgatgagaaggcatttctaaacctatgttcagattggtccaattaaaccactcaaagattcttgtacggtgcatgataaaaaaaactatgtatgtaagcccttgagcatatttttatagtttgatggataataagcatcctaggatgccttatgtctatagagaccttaataaaactcaacatatcaattgaactgacaaaggcgcattatagattttggatttaacgaagtcttaaccttagctatattttgcatatgtagcctacacatatttgataaaaaaattgcctctagctgctgctgctcatcttgagatgatttctggtatatatataatatcaagttcttaatatctgatcaatcttgcaataatcctgatcattaagttccatgtaaacacttgtctggtgtagattggagcctctcctaaaatcccatatgttaattttaggccttgtttagttcccaattttttttcccaaaaacgccacatcgaatctttggacacatgtatggagtattaaatatagataaaatgaaaaaactaattgcacattttgcatggaaatcacgagacgaatcttttgagactaattagtctatgattagccataagtgttacagtaacccgcatatgctaatgacggattaattaggcttaataaattcgtctcacggtttccaggcgagttatgaaattagtttttttattcgtgtccgaaaacccccttccgatatccagtcaaacgtccgatgtgacaccaaaaaattttcttttcgcaaactaaacaaggccttaacatgctagaaatttagaaaattccacattaattgactataatccatcctaaattttcatccatggcatctaggaagagatcaataatgatgttgacaaccaaattcggcaccagattgattctattcataaattgcagaattaagagccattttcgtagaaggctgtggttaattagaccgcagtgcatatgccggtttgatcaggaccatggcagtctgatggccaatctgattggcgtggagcatgcggcctaaccggcaaactccgagtccgatagagtctcatgttcttctgcttgtttgagatttttttagtcctaatacattccaggacctacttacactacgagaattcagaatttgcttggtggccatctaatctctttggcggttcgacatcacctaaggtaaagtgtattcttatcggtctagactgccaaggttatatttcttgactattcgaaagtttaatattctccgtagttttcttggcggttagaccgccaataaaattttctctcacggttagcagccaagaaacctggattttcctgtcactctagacttggcggttggatgtcaaaatatattatcttagtggttttcatgctatccttggtggtttttggccgcgaagaaaattccgaattcttgtagtgttgggacgtggataggctttgtttatgtaagatcaacccctttataagagctataactaattcatcgagacaaccagcacacaatcaatcaaagaatcgttcttataccctttttctttacttctacccctttaaccctagttcatccatcttcatcaatttgcattgaaagccatccactttttgcggcgagagtacgaaatcttttataggtttgtcccaaaaatcttccgttccgtccatgatatggttgtttatccccaaattaatctaaattggttctgctagcctattttgattctatcaccgccaagatcagaagccacaccatctactttgggcaatggttcaagatcaagaggcaccactacttcatctacatcaacaataccggaggctcgatcggtttgtgtgtcgtcaaatagtcttttgtaacacgtatatggctccagcatggattcatgtccagctaattattgcaagcaaaatgagatgtgttgagtcctttcctatcacttacatgacactatacatattaatttttagcttatatgcaattctatagccagtattatgaatggggagtggtacctattttgagcaaacgatgaggtgtacaatatcgtactggaaaatgtaaaatgtacttatcatgagctgtagccgcactcataaccaatcaataactggcacaaggaaagccatggaacatctttacatggtctttcttgcggcatggttttaaagtagcaaattcgtgctaccgtatatgaacatgtgaccgtgacacaaaatcaagaaatccagaatgaacatggatcctaagcacatgacctcaccgatcgatcaccaccaaagcctttttccatttgtgtggcaataataattaaagttttgtatagtttagtacatggcgccggcgggtaattaagctgcagccacctgcatccgatccattcgtgcatataacctaaccacccatttcgccttctctccactctctctcctctccctctctctctctctctgtctctctctctcggggtattgcaagatagtagctaattaaccagcctttggccttcagtttccccatcggttcatcagagcacgccttcaatttcctaatcaatctcccatataattccccttagcttgtatgcctatcattagtacttcttgtgttgtgttgtcttcttgccttctttgagctagagctagctaggtttgtgacctgctgtacgtgcgtgtgttaattagatagatgtcttagatctgggagagagcgaggagatggggagggggaagatagtgataaggaggatagacaactcgacgagcaggcaggtgacgttctcgaagcgtcggaacgggcttctgaagaaggcgaaggagctatccatcctctgcgatgcggaggtcggccttgtcgtcttctccagcaccggcaggctctatgagttctccagcaccaagtaagcaatccatcggatttataagtatatatgtatatttcccctaatttaattgtagtttccttagttgttctcggatctgctttgaagtctccttttgttcttgatttatttttgaaagaactctccttgttctttcacttgataggtatatatatctggttctggtaatctttcatccttttaagtttgagacgtttttatcaacaaaatgacccaagtatatgtctgatcagcttttcatcctttcaagttttgaggcatttttatcaacacaaagacccaagctaagcatatatgtatgcatggctattagtcattcttgtgatcttttagtaagctatagctacatagcaatcaatatgtatgcatatagtgtcagtttaattgtgatattttccctccgttctcgaaaacaattgacacttggcactactaagttttgatcactccttttctttcaaaaaatttataaacacttaaaatatgttatattattaaagtatgtagcgtagaaaatataaccatacaacttccattcatcatcatataattatttaaaagtaatttgtgatcaaagtaacagccgtagtactcaaccgtgtcaaccaagtcagttattcaagaactgagggagtaaatattgaatgcaaaattaatatgaaaattttttcttctgctatatatcctttttcagcgtacgtatgttcactcttctgaattgattacaacttagaaactcaaggtggatatatagcgaagaaatattaacatgttaacgtttaataaaattagatgaatttgttctctttttttttgtttcaagtgatgttgatttgtaccaaaatcagatggcatgtgtcacggtcaaacttattaattaaagagatttagcatgcaatcttgacaatcaaatctttacagagaatggcatttctatatatgaagccttacatgcatgtgcataaatatttttttggagctagagtgtggtagctttacgtgccactgcatcaaagacagatagatatttccagatttttaaatatctatttatctgtgtgttttgtctaagtaaattgaaggttttttaatataagctgtatgttttagctaaaaatgaaacaactgactcaaccatttggctttacttgcatgctagcatgaaaactgtgatagaccggtataccaacgcaaaggaggagctacttggcgggaatgcaacttcagaaattaaggtatggttaagaagataagctatcttgttaattgttactatacgagaacacgcatgtgatcttgatctgacgaccaatgacagcttttagtctctttaagattgattttataaataagatgctgattggccaactagttaaagtgctgaatgcactgtgttctcatgcatgcatgcagctgggcatggtgcactgctcacgctgaagaatatagtgagaaattatttctgaacccctctggctgatgcaggcatgcagcaggggttgttactgaattacatatacattgtttactgtatatatagacgcaaacctttttataaaaaaaattcatgagaattttagatgttatcatttctaggagttttttttttctatatagtcctttttaaatcaaaataatgaattatatgaaatcttacaaaattcctatggaatgtctttttctcgtataagttttggaggaattcttgtgtttttccaatggcataatcaaacggtcatttatatatttttttcatgtgttttgtaatcatctgttttacacttagacttgcatttctgtgattcaaagcgccctcaacattttcctatcttctccttccagatgccatatataaaaaactgatgcgtgttgtgcctaatgctgatagtaccaactcctataactggagaactccagcaaactcccctcaaaggagctgaatatgcgcacaatatatgcgcacaatccgatagtacagaatcttctgaacttgaggttggcaagagctgcaagccacgcatgggccaaagggggcagattgctgcaggttcctagattaggacactgggcccaaccataatctaactaagcccctgcaaactcctcaattatcaagcgtgttctggagcaggaagaagcactagtcgatctccctcggttaatgcatcaacagtaatgcataggacgaaagtaaccgagcaattcgtaatctcaacataagcaaaaacaagcatactttaaacaagataaaacagtgtacaatacaagagcttgcagagtattgtataggcaggagaagcatttgatggtagtgcaatataatgctgtacaagttgcttgaaaataacatgctcaagtcttaatttctcagtaattaactttcttcatagtggccacactggtactcactcccgttactccactacttagcttctcacgttttcatgaaccacacacttcatcagcatctgagggcatcagggcaggccatcctcaagtttgcaaatgatggaaaatccatgcacatcctgacatcgaacgttcagccaaagaagcgtatgaagatcataaggcgattcgcgaaaaaaaaaaggggcagattataggtgcatacgtaccttttggcacgataaggacttcgctgattgcattggtccaagatacagcgcagtaatttcgctgcatcttatgacaaccacaaactcagaaaacaacacccaacacatactgaacctgtctgagtatctaacatccatatttcagaggggggcaaacttactcggtatatttatgcattatgtggcaacttggaggttaaaaacagttggagactcgaaaggaaatctaaaaactgttagaaaatggttttctaaataacagatgccaatagcgtaagcagaatggctgtaaagcaacaaagccagaacaacaaggatacatagcaaaccaagtgatattaacagttaaaagtaccgttgttgctcaattgaccagtaaactcgacagacaattgtaaacataaaaaatatataccttaagaaacaaaccgtctacgcataaaaatttcactgctgctgatggtatgatattcatgttactgaatcatgggggaatatgaagtgatattttcaggagtactagcttatgtactcctttatgaatttcatttccatgtcatcatttatttaatgtttattctttctatatgttaaggaaaaggtcaaaacaagcatccacacctacatggtctcaaagaactgtagtacatagcatgcccccacagagatccttctctttccctctattttgggttcaaaaatgccatcgctcatgaaaaatacaaaaagataccaagcaccaaaaagggataaatctgatttgccctgagtttacattggagactgtactcatcattactacagtataactgttatatcaacaaaatggttgaaaacaaagtcctgattaaagatacaattatacataagtacctcctatgtctatgcgtaagttttgtgccaacaaagtgatcagcagttatgcattatgcactccaatggccagtccataatacagatcagcaaggttatgtctagattttttttttccttagaacacagggaagttcagtgtgcaaatttttcagctaggagtttaggaccaaaggtttaaaagtctaatgatgatgaaacaaccaagctactggagcactagacaaaaacaagtgtcagctgaattgacaagttggtccaaattaatctagaataataagtactgaagactgaacaactataacactctgatgcacttgtgctacgcatatcccacatcttgagatattggaactatgtgaatcagatagcattttacctcatctcaaatgcatatgtgattgagttgtgtgtgatttttggcaacatactgcgtttctagattaatcatatgtatatagttcaaggaaactgacatgattttctttttttgctgatagatttggcagagggaggcagcaagcttgaggcagcaactgcacaacttgcaagaaagccacaagtaatcatctaatgattctgcaatggaaattgatcatacattaatataaaattcatcaagaaagtagtttatcaacaatttaaatgccacatggaattgtataagaaccaccaaaagatgcttaaatacttgaaggaaaactttaggaatataatcagaatattcactgtcagatttatcaagaaagtagtttatcaacaatttaaatgtcacatggaattgtataagaaccaccaaaagatgcttaaatacttgaaggaaaattttaggaatataattagaatattcactgtcagatttattttaatagtattcctaagtttctttaacaaataagtttggcctgtctcaaaccatgtcgacagaagagagctgtagtggcatatagattgggacttcttgaactgctgagattactcttttgcatggttgtaggcaactgatgggtgaggagctttctggcctaggtgttagagacctacaaggtttagagaataggcttgaaataagtctacgtaatatcagaatgagaaaggttatattccttgtgctcttcaatatccgtatttttgcttttgatttgctataggctaatgatgatacagtaaacacctatcaaacaggacaatcttttgaaaagtgaaatcgaggagttacatgtgaaggtttaccccttgcacttaatgtcatttcattatttcaatgcaaaagaacatgcatggaatattgtgaattttgtgtactaaatattaactttacttcagggaagcctaattcaccaggaaaacatcgaactttctagaagcctaaatgtcatgtcgcaacaaaaattggaactgtataacaaggttcgatgcaaaattctcttagaaacttgtgactacatgttaacacattatcccaagcaactaaaggaacaacttgatttcagcttcaggcctgtgaacagagaggtgccacagatgcaaatgaaagttccagcactccatacagctttcgtatcatacaaaatgctaatatgcctcctagtcttgaattgagccaatcacagcaaagagaaggggagtgcagcaaaacagctgctccagaactggggtaagtatttcttatctagaatacataaattgcattactcaaagaaggggaagctcaatcaagcacgtatgttttcatatgtagcagacttcatctgccttaagactatgccgtacaagctggacgataagtgatcaatttcaaacaagcacaaagcctttcagatgcaagtagtatttttgtgatagctgagacaataaaaaagtgtacagactacagactggacagattatgttgtcggatgctcatgtaatgactgtggtgtaataagaaatacgtagtataagtttgtaaccctgcttactctctattgctttctagaaaagctcaaccaaaactctgaaaagtctttggactgaaaaggttgtaacaatgtttaccaggaaggtgctttggtgatgaaaaaagagttgtcactatgcctaagaaggaaggggtgtgagctactggcgaaaactgttatgtattgcacatggtgaataatggctgttgaacatgtctactcagacttaacagtcagcccttactcatggctgttcaagtggtgttacagatgaaggtgcatccaacccaattcaaagcagcaacactcatactggtgctgcaaataccgtgtatgctagagagaggtggttggatagaaggcccatgtatcatgtcatgtcattgattcacaatttcacgtgtcgcaacatttattattagtagtattctactgcaagtctgcaactaagaaataaatcttctgttaaacatgaacggctcctgatgcaatacactggagttaaccactaaaatctcagcaattgaaagttccacttagaaaagcccataccacattaaaatggtaatgcctgtatttaattgattttgaattaaaagtggtgctatcaactttgagttccaaaactaattatttccaaagaaaaaggtaattcaataattaccatcacttggtatagattggtcttctgtgacaaccacggaagaattacacaatacatataagaatgagctacatgagtttactgtcttacttgtgagaggtcttacttgtgcctttcttgcaagtaatgcagttgttgcctcatgcttggtgccaccatgtgcaataactagtcaagcaaaatataaaaaaatatatatatttgagaaatgcacattgagtgacctacaaagcaataagcacagaatatagcgtagctgctacttgaaaattgaatcagtcataaacaaataattgcctatgctcgaatggattctagaatgtcgataaacggcacaatgctaaatactttaatgggtcatcagcatgaggcaaattcagctaacaaaatggagcatgcaaactggccaatctcagttagtttatttcttttcccagaatacaatactggatcaaatcagatatttgagtacgaactatgattccgaaacagatatctgcagtgcggacttacagtttgtaagatctgaaggaatctagcaaatcatctacaaatgtcgttagaaacaacccgaggtttccaaccccttgaagcccggaatcccccctactcccccatgataatccaaacgcgaaaccctagaaaaccagacccccagatctcccaacgagctcatgatcaccgtaacgcaaaccacgccacacacgaaatccaaacaaacgaaaccgagatctagctgcagcagaagaagcagaatggggggtctagaaacttctctccgtacctcgaatccgccgcgggttccagccatggtgcggcaagggtgtgggcgactgcgactgcgaccgcgagcgatgaagcgacgggtgggaggccggcgcactttaaaacgggggcggagaagggtctagaaggatcgaatcgatgtttccagaattccaagtggggggtagaaaaggcaggaaaattggcgcagtggagttcggcttttttggcgaaggggacgagaggagggagggaacggagcgcggcgaaagggattaggaggggaagatttgggttaagcggggattagtttaattacgtcgcggggagagggttgtggccgcgcaggcggccacgtcggcccgggcggattttaaatggaacaggtgtcggatgcgtagcgtggaaagagagatctgtgctcgttaatcaattcgggtgtaacttttgtaatgttgtcctggtgaaggggactctgaactgatgaggggaatagaaagttccagaacatctaagaatgcgtgtaaaaaacaatggattctactctcgaaagttcgagaacatatggacatgaaataatgtggaatgacgaatcgtcgaataaacttgccgcactcgggtttagtcgaatcagctgctccaataacaaggcccgtttaacttggtaaaatgaaaattttttggtgtcacatcggacatttgatcggatgttggaagtgatttttggacacgaatgaaaaaactaatttcataactcgcttggaaactgttaaacaaatcttttgagcctaattaaaccgtcattagcacatgtgaattactgtagcactttatagctaatcatggactaattaggctcaaaagattcatctcgtgatttacatgcaaactgtgcattagtttttctttttatatatatttaatgctctatacatgtgtcaaagattcgatgtgatgtttttgcgaaaagtttttggggaactaaacagggccgcaatgcgtcgtttggctgtggaacctgaaaaaaatgcccgtgtgttgcaatgagtgaaagctattttaattttattattgctatacggtttagctaaaatgaaatttaccatgtgaattcacttttatatatatatatatataggacactcatatggggcaccatggtgcccaggtatatatatatatatatatatatatatatatatatatatatatatatatatatatattcatgagctgcagtcaggagttcgatcgtctcgagttagcatgaaagtttttttatagagatttattatacgagttcttctgtatttctaaaagcggacgaacttaaaaaccgactgaaaatacggatatatatttcctaaagggaacgaaattaaaaaccgactcatatacagtttttataacggtagagaagaaaaggattaagtaccgcagtttcgtggactggagttcgccgtgaatgccaggccgcagttgacgagaatttattcgtggactttgagcctctgactagaacaaagcccaaaagggcccataattcacagtttatacgggccatcgacggacgccatcatagacaagcggacccaaagtagtcatttgaagttgtcccgtttaaatctagcccatgtccgacttaagctgagctgccaagtgcaaaggactgaagattagtcctccactcactcccatactgacggtggagatagcgatataggatcgatattcatgttagatggagtataggtcatataaccacacgacgatatctgttaccacccgcactgacctaagatctttatgtttttttaataatggatttaaataaaacccggcctctacatctcaagagatgtacacagccacatctaacatctttatgtgtggacatatctaccacgatgcatgcgacaatcatgttgtaagatgatttgatttctttttctaattattttttaagtttagttaagtttatgaaaaagtcaatagcatctacaactgcaaattagattcattaaatctaatagtattgggtatgttcggtagcctgttttcgcagctgtttgggttgtgctgcatagcctagccgttcggttgcagtggtctgtctgtgctgcacagcccagctgctgggctgtggaaacggctgcagcccactccactataagcatgtaacgatggagagaaaaggttagtttctggcaaaaaaaaatatgacacccctcttctagttcacatctcccatcgcatcgcccacactacaccctccctcccacttttgaatgtgaacaaatttagcattttgcaggcaaccgtttttgtctagttgcagctagaacaactgttggctggctgctgtagccactatagctgttacgctgcagcagtcagtgccaccgaacaggccgattgagtatacgttggatagtatatctgttttgtgtaaaaaaatgttattaagttcttttataaacttatttgaattaaagaaatttgattttagaaaagttaaaatatcttataatataaaatggagtgagtcccaacccaattactaatttaagtacccccaataatttgtcacgatatccgtagtttagttgacctgcagtctacactacagacgtgaaacgttggacgacacagctcaatctgttcgcctcccaatatcatgggagacaaccaaggtccgtccaattaagacgaatcatttgtccttaaaaacggccacgactacgaggatcgcgggtcagataagatcatggatctcaaccacgcacaaacagccaaacaggtgccatcttgagggtttccatgaactatgtcggcgtccaagcacgcggctcgtaaagcgtaaaatatgatcaaagacataattgggggattacagtaagttacggggcactaacctgagattatttctgtgtggacgcatctactacgcgtcttcaacaaaaaggagtaactgctgcaactggggagaaacaaaatgataactcttcgcgtccacgacaagtatactccaaagatcggtttcctgctctgcaacgaaatgagaaagctgcatctgcacgagagaatttttgcactgcaacattttagggcagatcatttgtctttacgataagcaagatcgagtagctctctagaatcgccgcggaaagtgagcaaaaatcacatccaatcaagcaaagcagatgtgcaaagcatccgtgtgtggggaagaagccaacaagaggcctcaggagagcagagcgcccaataaacttgtgcatttttctctgccccctgcctcctcctaggcgatctcacattttttgttgcgtttctccgcccttcggccacaccggccggctggtttacattagcttactaatcaaagcgcgagaccctagctgctgccaatgccggggaaccccggtctcacgcgcacccacccccactcgcgcgcgctcccatgacaaattaatccggctgcacgtcacgagctcgcgctataaaacgccacgccgtggaggtcagctagcgcaactgagcagctagctcgatccagtgttcaaggttcagccgagttcgatcgaaaaaccaccgtgcgtgtttgttcgatcgatcgatggcggctcggggaagaggcagtgcatgcaacggggcagccgttcttggcgcggcggcggcggtggtgatcgtcgggttcctcgtgatgagcgccgcgccgctcgccgaggcggccaggtacaccgttggcgacagcagcgggtggaggttctacgccgagggctgggccaagggcaagaccttccgcgccggtgacgtgctcggtaatatgcccgcggccgcgcgctctgcatctgttctaatctgcgtgctggtctggtctatcagtattgatcaatttatgtatgcatgtatgtggcattgtgggtggcctgcagagttcaagtacaacgcggtggtgcacgacgtggcggccgtggacctggcggcgtaccggagctgcacggtgccgaagggcgtcaggaagatgcggagcgggcgcgacaaggtgacgctccgcaagggcacgcactacttcatctgcaccgagccggggcactgcaaggccggcatgaagctcgccgtcagggccatctagctagcctattctgttggctcgcaaaagaaaatggtcagtctgagctagtccgccctgttcgattgctcgttagtcttttctcaatgcgtagccatgtgtgtgactgtatcggttagtactcctactacgtttcatggtcagtttgccggcgttgtcgtggtcatgtttaattagttagtttggtctggttgtgatcttttcgtgctctgcaaaccgtgataagtatccatcttaatcgcaaaggtcatgataccaaattctcctggttaatccagatttagatttgtttgaatcggattttttttttgacggagaatcggatattttcccaggggatgatatgttttttgttcctgcaaggttccaagtgttccacacgtggtgtcaaattcactataggagagaatgaaaattgtagtactacgatcctgctatcagatagtgtttgtcgagacttcatgtggtaagggcccctttaattcgtaggataggaaaaacatagaaataggaaaaacgcaggaattgaagtagtaggtttcttaaatcctatagaaatcagcaaacacatgaaagacaataggagtcctttgatagtgctatgggaaaaacaaaggaaagtttacaaagaggtcacacctcttgctatttttcctatgaaatgtgaagcataagaatacaattgtatggaaagtttcatttctttcctatgaatcaaagggacatgtagtaaaaaatccatagaaatttaaatactataaaaattctttgtcaatcctatgaattaaaggggccctagaagatgaaagagatcctattctgacaaccagtaagccagtaactgaactacaaacacagtgaacccccccccaaaaaaaaaagaaaaagaaaaaagaaacagattgtcatggacgatggtcatgcacccgcgactatggctggcttcttgttcgtgtagagttcttcacgaggaatctcgtcgcagcgcagctcctcgtcgtcgtcgcagttcctgcggctcaggccaagcgtcatgctgctacccagagagccggtgtggagcagaatcagatacagcagctgcgtcagcgtcaagatcgcgatgaacgcctccaacgtcctctgctcgcaaagacatgcccataaaacgttcgtaatcgaaatgacaggaacaaaagaaagaaacggcacgtaacagatgcgagcgaggagtggtgcactgtacgtaccagccgccttcctcggttccctagagtgatgtgcttgcacgcgaggctgcgaatggtaagaacagagaagcaccatatgagattacggatcaaatctccagccaagtgtggttggattgtagtagtgtgtaaggctgtaagctgccggagtgagcgcgcagagagcggttaacccgaaggagagggcggtgagcgcccaggagacgagtccggtggacgccgccgcagccagggtctcgccgcgccacgccctgacatggagcagcctggggagcaccgagcacacgccgaccaccccggccatcagcgagaagactagcaggtaccccgacgacgtgttccctccaagatctgcaggtagatgcacaagcacagggcgatcgcgtcaacgcgcggcgctccgggcggccgggcggcgccaccgccaggacgccaccagatgtcacgatcgataatacgtggtggctgtttggtacgtacggtggtgcgtctcgccgtcgatgaacttgttgagagaccacccggcgaggcccaggacggcggcgtgcatgacgaggttgacgcacaggagtggcccgatgtaccgccggcacgccgtgccagccgccatcgatcgctcgatctctcgttccctctcctcgtccacgaagcacacagcaaaccgacccgcagtggcacgcgcgatggataaatcgagactggccgtatgtaatctggtcgctatgtagtactcctacgtactatgcgaggatgatgtaccaatgctatcgcaacatgcgaggaagggtggcagtttcaacagcaacggcagcgttgttgtacacgccaagctacggagggggcccgtctcgccgtgggccgtgtggcggcgcacgcaggacagcgagaaaggccgcgtcgacacgcaaaggcgtacgttagatcgacgagaggcagttatcaaagcgacacgagaccgggtgttttagattaaaaaaaatggtcaaaaatgtcacatcaaacgtttggacatatgtataaagtattaaatgtggatgaaaaaaaaccaattgcacagtttacatgtaaattatgagtcgaatcttttaagtctaattgcgccataatttgacaatgtgatactacagtaaatatttgtaatgacggattaattaggcttgataatttcgtctcgcagtttacacgcggaatatgtaatttgtttagttattagtctacgtctaatacttaaaagaaaaattaggcaaagaactaaacatggtactttttttttggactgcggcgaatttaaccgatgacccgtaaggtaatagagtggtctgctcttaaaaaaaataaagtccgaatcagccgtcctccccccgggcgcactgtccccggccgttgcgcagcagccatagccccaagtgcctctccatttctctactccccaactcctccatatcctctctgcccctgagcaggttcacagttccgacgaaaagcggttgaattccacgaaattttgacgtttcaacacggctcggtattaagtttcgattggaatttcgaaggttaaacaatagatttggtcgaaatttatcgaaaaccgtgataccgatggagctcgaaatttagtggtcaacagttaatgtaaaccctgaccctaagtgttaggggttgtttcggggaagctcaagattctgagaagcaactagttggtacataacttctaggaatatggaaaagttgagtttcccagtttctggcttatagtttattttttagattctaccactataactttttaaatctggaaaaaaaaacggattatttggggggttctgattcagtgagaagctgcagcagttagaagatctctcaaatagacacttttagatttgggtgagaccaccatagaaagagggaagtatttgtcacgttagttttcagaagaatattcattttattcatataataaatagataatccgtgggtgatcataaatacttaagtttcttcaaatagaaatgccaactagagctgcaaatttctaatcaatttcaaggacagtttgcccatgtcgaactcatgcgactttgataatcacaacatcgtatagtaagattgtccaataatccaagtacttgaaagggaggaatggattataattctcaagggaacgtccctcgtttacatttttcttttagatccaatgtaaaacagttatgtaaaattctgataaaaaaagtttgttcatgtaaagtatgttgacgtctatcagcatacacacagaggaataaaaaaaaagataatttagcgcatgaatatttttactagtaaataaaaaaatggttaacctgaaacgggctggggacgttgaacgatggaattggccaagccaaagctctttttgagcaaaaatcgtcaattatcagccaccaaaccgacacgaggctcgtaggaggtcctcctgggaagccaggggcgcagatttttcagataggggacgaaccaatcactgcccaccatcttgccacgtggccgatcactacacagatcatcacaaagaggctcagcgcgagcgctactgtactttactgttcctgaacgggacgatagccgcgtagccaaggaaaagaaagcagaggccagggaagagccaggtagagccgaagagggtccacgactgacatggccgccacggcgtgctccacggcgcctcttctcggtggagctcgcctccccgccgtcggcgccgccttgccgccgccctccgttctcctcctcccccagcgcaacttcccctctcctctccgcctccatgacgcaccgaggctatctctgctccgggcgagggcgtcgtccgacgacacctcgtcctccgccgcgaccggcgacgagctcatcgaagacctgaaagctaaggtacgtgaccgatgcatgaagtattgaacagaagttaattagctcatgagttttatgtaactgtgtctgtgtgtttttacctgtggcagtgggacgccgttgagaacaagtccaccgtcctcacgtacgccggcggcgccatcatcgccctctggctgtcgtccgtcatcgtcggcgccgtcaactccgtgcctctggttcgtttacattatattgctcctgttaatttcgtatcagtactagtagaacagtgcagcaagttcacgtgcatgtggatatgctacctgctacagcttcccaagttcatggagctcgtcgggctcgggtacacaggctggtttgtgtaccgctacctcctcttcaaggtattcgattacgcgctaattaaacctgaataaactgaatagtcgcatctagtagtaatagctgttgcagcactgctgctgacacggcgatcttggatcctattcgattacaggaaagcaggaaggaattggccgacgacgtcgattctttgaagaagaggattgctgggacagagtaaaaaatgccgtcgtctgcaccaattttttggaacgattctttggatcgcacattgcagagaccaaaacccgttgtttagagtactagtgtttggtaccgcgaagctttgttttgttcctttccttgatgggcaataacagtgtcttcacgtgtagatcgaattaataataattacgaattgcgtctcgactaattaataataatttgccttcacttaaccagcgagagccagcggtcgcgcggcaaattgcgtctcgactaattaatactcccaaaatgtttgaaaccgttaacttttttaaacatatttgaccgttcgttttattcaaaaacttttgtgatatgtgtgaaactatatgtatacataaaagtatatttaacaataaattaaatgatagaaaaagaattaacaattacttaaattttttgaataagacgaacggtcaaacattttttaaaaagtcaacggcgtcaaacattttgggatggatgtagtaataatttgccgcgcgacaccgagcgtcttgcgttttcattgtgcgagatcgtaatatcaacggtatatttgtgcaaataaaattataacccgaatatttctgagagaaaaaaataaaaggcatattttcaaaaaaatttcaccaatatatccaggagatatcgagcactgttgcaagttgcaacgtgcaaattcaagctactacatctgtttttgctatcgtaacaactcctaccttaggcataatcatttttgaaaggggattaatttattcatggggcaatataatctttcacgaaaattgttcatcatacattgtactttattcaatccccagaaattgatctaaagaaactggccaacatgctgtcgatcctgcatgttagcggacaatgcttacagcagtgattttatgaatgtgattatcatgaacacttttgatcgtcccggtaagttttcagatacttgtccagttatctacatgcaagaaaataattaagtatgtactgattactcaatgtacatgggtgtggcgcaggcacaacccagtttacatatacaagtcattttgtttcctttatggagtgtttctacaaaaccatgaacaccaatgtttacacaagtacaatcgcctactttctctccggtcgatggaacagagataaaagagatccaaaagcaccgagccaaacaccaacaaaaccgaaaaaaaaaaggaagagaaaaacttttgaattgaacaacgttatactacttgaatcgtgcagcttcgacaaattttgcgtgaacttttgtgccaatcgagtccatgaggcatacgatcgaacgcaggcaagtctcgacaccggacacgtacgcatggtgccgcgcgccgggccgtgcgcgatcgtacgtctaggtgacggcgcacggggcggcggcggcggaggggcgcttgacgaaccggcccttcatccgcggccgtttctcggcgttcagcttccgcacctcgtaccgtatcttcttggagaacagccgcgtacgccgcttctccctgtacctcgtcacccgcgcctcccgccccgggccgtccatccgcggcctcaccgtcatcatccccacctccgcgccatgcccgccccctcccgcagcccacaacccctgcaccaacacagttttcgattcagtatgcatgtcgcatgcgctagcatgagagtatggacgacacggtattgaaattgcaaaaatcacgtaccgagtaatggtggtcgttgggccagaagtcgtcgagctggccgtgcggcggccggccgtcggtccacggcgagttgccccagctctcgatgatcgcctcgtagttgagcctgagatccaggctcctgtggaagaactgcgaatcggctgcggcgccgttgctcgccgacgacttctgttcgtccggcgaggtgcagttgaaatcgatgtccagcacgtcggcggattcgacgtcctccggcttcggatgagcgcggcatgatgggagagataccctgctgttggaggcaacaccgccgtcgagctccatcttcacccggccggattcttctaccggcggcgttattagccctagggtctccatgtagaacgagtcctgcagctcgttgctgtcgtccaggccttgtccgagtagggcttccatgtcggcggcgaactccctcagctcggcgtccgtcggttcgaagttgacaaagctatccgggagctgctgcacgggcgacgacgccgcagctgccggatactttgcgtcttccacggcgccgtcggcggcgtcctccttgaagcacgatgaggatgcggccgccgcgtcatcgatcgggggcggcgagcagaactcggcgagggaggggtcaaagaccggaacgcggtacagcaactgcccctcgagctcctcgtgagctccgtcttcgtcggccttccgttcgtccgacgactccaccgccatctccggcacgacgagccgcctcgagagcagctgcccgacgctcttgacctgcgggcgccgggtgcgcgccttgcgcttcgaccatgccggcgtgacgccgccctctctcttcgacgtcgtcgtcgtcgtcgtccccaccgccgccgccgcctcctcctccaccgacgcccgcgccgtcagcggcgggggcgacgagacgcgcaggcgcaggcgctcgtgccgcctggcgagcgggttggccgagtgcaccgacgtgtcgcacccctggcacaggaaggcgtcatccgccgcgcagtaccaccgcgcccgccgccgcaggcagctgtcgcacgcgcgcgccgccttgccgcccacggccccggccgccttctccgagctgcagctcatgcgtcacgacgaaacaaaagaacaaacagaagaaatctcccagcacaaaagatgattccacaaaaaacctctaaaaatctatgcagctcacttgcactcgatctgtacaaagtgtgtgttaacctattgtacgagttgcgacgagggcatggtatgatacgccaaaaaatgacaaaagtaccaccggataagggccatacttgagagatatgtccaagtggagtactcttttccggaggaatcctagcagtgtagtgtgctttgcacttttggtgttgtgatggggcccaattgcaggtcttatctggaacgtgattggtctggtcgtaaagccccatccggttcactgctctgcgattggctgcagcgattttggcgggcccactgtaatggtttatgacacgtgggtggaactcctgcgggatccacaaccagcatcgcggtctcacactctcactgcgggcggctcaaaagttgaacggtagattttagaaaacctcatattatggttaaaattatagtaaagcacatgtattatgatatgtgatacttaattttaaaactaaatcttagagttgattttgatcttttcaattatagttttgcttttaagttgctaaaaatgcactaaaaaatttctcataaattatttgcttatcgttaataagcgtaacggctcataattagtaggcaaaatgatgtaactgaagttttatggtttacaattaatcaataagcttttgaaatgaaaacaatttttaatcatgtttttcacctcaatgttacagtaagcatatcgcatcatagtgagccccaccgataagcctatgtttctttcgaggggagagtatgataattctgtaaaatgtctggaacatgttttcgtgaccgtagggagtatttaaacacgacactcatgaacaatgatcaattattttccttgcagttgtgctatccctatcttgttgaaatgatctcaaaagttgtattggaactggagaaagatggttaatctaatcacacttcaacagtaatatgtatgcgtgttactatttataagttttgtgttagcgagatatagtaccatgatttgtccttttcatgagaatctgcatattcctgggttgtggagatttatattccagtgaaaatacgatcctcactcaacaattcatgacttgtaccctgtcttggggcttatgactttgcaaacgatgtaatgctacactcatcttaaagtataacaacttttagctatgtatttgaataagaatgtgttcatatacatagctagaaattgtcataattttagatggatatactagtatatataagtgactgcacttttgtttaaataaaggtcaggattcccattattttttttaaaaaaaatgacttgtatggttagctagatagataagttgtaccaaaaccattgacttatttgctctagttataatctgctacaagctaaagagatgaacttgactgatatctaaaaaacaggaaaaatatggttcttgagaaagtaccttgagatatctaatttttatataaaaaatttgatacctcgagacattttgtacgtggaggtactaaactttacgctagaaaatatgtacctcttggtacctccttaaaaatggtaagtctccggtatcttacttaccttccagcatgctgttcccaccattcctgataaggatttcagaaaattgcaaagcggagacttggtatcattgaaagatactgcttacatattgattcgcctttggagcatagcagagaggtcagcatgaggttcaaaaaagactcgcactacaggctccgggcgtatctcttatcctgtttggataatgcattcactctccatatacatatacgtagtatgtctctgtattgttcctttttttttcatgccattggcttgtctcattatctgcattttggaagccacacagagatacagaagaagaatgcatgcatatgcacctcatgtttagctactgttcgccgtcagtcagaaaatatcatatcagtttcagacttcagagacgaggaaacgataacatcagtagtattattcagagtattatgtatacatatatttggttcatgcaacataaggaaaccgggtgaactgttaactgaatccacatttatggagtcccaaatcaacgctctaaacattactcacattgactattgataactgattagtactcttgcttgtgtcacattcttatcttgttttcgactttcagtgacaactgacgagcgaaaacactgtggatttgtccactggaaaactacgagaactcgtcacacttcacaccttgcttttcccatcaactggggaaaaaatgtatacgctcctatgctgttccgcctggaaacgagcaagtcgactttaacccagccagttgccatcctactccatccgtggctccaaatatatctctgtctagaagaaacttttggggctaacgacattcagaaacatcgttcattagtttcagaaaagaaacatcattcaaagggcagcgtataacaattaacaacctcctgtttgtacatggatctgccatcgcctatttttctagacggtacgcgtacaaatcttggcgcagagccgacaacccgagtgtccatttctactactattaacacgtcataatcccaattttctcggagttgggggaggatagtagatgggaaagccaagcatagaaaaggtctaataggataccaatccacacatgtcgccgttgatccgacggttatggatgggaatgctctattacaacggaccagaagagtccgaacatatgcggatcaaagaaaaatgactggaaaaaacgaggccgtcgccatgctccggccagcgcgtactgtcgccaatttcaccttcatatcttggctccttgtgccgccggccgctgtacgtgtcgccgtcggagtcatcgtcgtcttaacctggatgccatcccggtcatgcataccacacagaccgtagctagcgagccggatgtaagcaactctcttctcaacgcattgttttctactgctgcgtacgcggcaggggctccagtgtctatccaatggagtcgcgtccctctcagctgcgagacatttgttacggtcgcaagaagaaattatcagaacttcgtattcgtactagtatcttcaaaggggcagagaaatgcgtatactccatcagcacgtccaccacaatgtcggcccatttgcaggttaaattccttacgggatggcccaaagtataccggcccaacttttcacctaaccattgcatttgcatatactccagaatgattatttttttatatttatatttatcttttaaaagttttaaaaaataaatcacagttttaaagttttgcgaaaatatactcctcccatcataccatagggcggggctatataaattgccctatcgtaagacgggctatgtgatgtggcacaaagtggaaggcgcacactggcctcttctcgcctccccgtaggccgatttaatttggtgacaatagtaacagtttggtgatacatggagcatgccatgacaattttgcagatggctccctcccggcgataaatttccctcccctagggagggcgatttatcgctaggagggggcacctgcaaaactgacatggaatgctctcccacggggtgcatcgtcaaatagattgccgtaccgtagggcgatttatatgtctcagcttacggtacgctcgccctacggtacggcgggaggagtatatttatataaaactttgaaatataattttctttttaaatcattttttaaaaataatataaaataataaatcccattatgatagtgacacaccctaatattttcatagtgcaaataaaatactagtaataattaaaagggtttaatattggagatctttgagcctccatcgtttcgccaacagctcattataaccataatgcttattaatgataaaaaataatccatatgtaaaacttttatacatgaacttagtgggaaaataaactgttacgatgataaaaaaaatcaaaatcaattataaaaaataagttttaaaatttaatttttagttaggactgataagctgaagagaaaatgataaacgagtgtctaatatacctttttcagttatcgttgagctgtcaaggtaaggtcatccattatcttttttacactatctacaattatacttcgagtttaaacttatactacatttttaaagtggtatatcacgtattggtatatcctactaaaattttctctttaggtgacacgaaggaaacagggagatgttcccttgatgaaaaacaacacctctacattccgttccatcaaacccactgcccactgcccaccttatgaatgtgctcaatggctgagcttattagtgtggctcgcgaaataaggtactaggttgttagcatatgctttgttaagtattaattactcctttaatactccttccattttgatatatataagtatttctagattcattaataaagattaaggtattaattactccttttattttgtcataaaagtatttctagattcattaataaagattaaggttgagaacaaaatattttagtacacctcggtaaataagggatgtatggaggtgagagaatatgtgggggtaagatgagagtaattttgagcgagagatgattgatgagataagtatactgtaaataatgctagaaatcactatttgtcgaaacaagatttcggcaataataaaagggggtggctatcaaactaggaaagtggatgggtttggagacaaggaattttatacaggttcaggccttcttattcaagaagtaataccctacttctgtccggggatgattccgccgagtgtgttattgattgtatgattggaagaaaaagaatcgccccgagaggaacccggacccctccttatataggggaagggatccgtaatacaaagtacagtccatattctaatagaatatcaatatttggtaccgtatattctatctatatttggtaccgtatatccagctggaatataaccgtcatgtagatatggggtaaccataatctccacgtagcccccgagaccttcgcagttgaccaaaatagtcttctcgaaacaaaaaacaataatccgagtgcttcaattcaacttgctccggcttgccgagtgctaaaagactgcgaagggcgaaaataaaacatggtgcatcgagtagatgcacctaattaggtgtagcccccgactatgtgattagttgaaaaactaaacatatagtcaagaaccgagcgattttatatcgaagcatgcatggtactcaataaaatacccacccgactgcttctcacttgaatatatcaaggacaaaaaatatgaaaagggccgaatgataaacactcaaaaggtccaaaaatagatatatttggtaggaatccgagtaagaaactcttaaaatgattcatcaaatatgataaagatcatggtaattaagaagttcattagcctaggctataacccttaccataatcaaaataagcatataacatgctaggagaatgactactaataaaccagtcatctcaaattaacccaacaacttttgtaacctaaaaaagcttacaaaaatggtataacacctttctgtcaggcacattttcatgtgcatcataataattccaaataattattgaatcgcgttaaaaaggattttaacagcatcgggccgcatcattgtgagcacatattgccaaagcaaaaagcgcctaagtccctagggatcacaacgggccacgctgaaaacataattgggctgaagtactgtacaggcccaggcccattagtactcccgataccctaaaaacaccgaagtccaaacgtcgtttcgtcttccccgccgagactctcgccattccccactccgtgctacagtacagaaccgcgccgacgaagctagggttcatcaatctgctccaacccaccctcaaaaacttcacgaaatttctccccgcgtccaccgctccgattccccattcctctccagccatatctcggaccaaattaaaccatccagttcacattcatggcggaagaaagagaaagcttcgagagtcagtgggcgctctccgatgtgacagaagataatctgaaggagatggtggcgcacggcgttctcccagcgaaggagattatcgggtggcgaccggcgttcggcgaagtattcccgacccccgacacacacgaaatcatggtatttgctcatttcttctatggcggattttctcttccaacatcaagattcttccgggggattctgaacttctacgggattagcttgcatcacttgaatccaaactccatagtgcatattgccaattttatccatgcctgcgaagcttttctgggcattaggcctcattttgccttgttccgccgcatcttcttcctcaagccccagccaaacaaaagcaaaccgtgcgttgttgggggagctggtttccaactcagaggaaccttgagccaaaaatatttctccatgcccttcaaaacctcaaacaaaggctggcatgcaaactggttctatgttcagaatccttagcccgcactccccgagtactgctgtcttcctccgttttaccaggacacatggaactcattgcctatgggagatgaagctgctcaggcagtggaattgatggaacgcatgctaaaactgaaggaacaaggtttgcagggagaacagatcactcggcacttcatcaaaagtcgattagctccaatcaaagagagatcccacacagcttttgagtttgatggcaagcatgatccaaatcgggaagatccagattctcttgactttaaggtcatgaaagaaagaatgtacaagatcttctcaaacgctattgttgtcagctattcacatctgctgcccgttgtgccactcaatgcattcaaccctcctccaccggtatgcactcaaacatttcaaccttcctcaaaagtatgcttttaccccctgttaagctaattgaaagttcgaaatatcatgcccaggaatttgctttgatgaaatcggatcctccaattgctcaacgctgatcacctcgccagcagactggtcaggcgagtggaggaccaaaaattcgatctgacgctcgaccaagtgcttccgatccagtcggccagtcagatgctcgcaagaggaagctggttctaagcgacgagaaaggcgatgataccggaaggctcggagacagagaagcgaccggaaaatccccaaagccaactaatccgaagaagaaaacctccagtcgtcctttgccaaaaatcagaaagtcttctaggtaaaaatcatttggccatcttccttgtcttgcagcttacccactgttgaaataatactaacagcataactcaaactcgtaggaagccgtctgacatagatccttctgaaaaagaccccgagccggctgacatagaggcaaaccgttcaaaagaaaccgggccaactgcagaggatcgtccgagtaacaaacaaccggcaaccaacaatgtagaacccagcaacgagcccccgactgggaaccagtcggccgaagctgaagtcggtgctaaccaggagcccccgactggaaaccggtcggatgcagggccaagccaaaagattcccgaggttgaagctcaaacgaacagtcctctcgggaaggatgctgacagtgaatcagaaaccagatctcctgtgaagacaccaaagtccactcgtccccgaccgggaatcatcacaggtagacacgctatctgaaatcattttgatccaacagactttatttggctgcttcatcttcattcatggatacactagggccaataattggtgatgaagaagaaatcctccggatacaagcagctgaggattcatgccctccgattctggtcaagtggtgggatgacaacatgcagcctcaagggatcgtgataaataagcaaaaagaggacgaagagttatgcctactgaagaaggcacttggtcaggcaacccgcattgtaaatgtaagccctctggtacctgatctcaaccatcttgtttgccatttaattcatgcgctaattaaactgtcttgcagaggattcatcttaggaacgaagccaaaacggtaaccttagagaggttagtccctcatctcggaaccctcgaagccaccaggaatcaactgcacgaagcgaaagaacttgccaggaagaatgaacatgatctgagggatcggattgctgagctccaggaatcaaattttgaactgagtggctcatcaaaaggtacgcacaaactctgctcaactgactcatactgttatctttgcaatcttgattaaccgtaatcaatgtagtgcaagctgccaagatatctcagttggagaagcagattcaaattctggaaaatgacaaggcagaactggcaagacaaagagacctggctttaaaggaagttgaaggtatcaacaatcaatacctcaaaagccattatcctccatatgctgacttattaatgtaaatctgttgatgcagacggcaagatcaaatctcaaactcaattcgacatcctggttggcaagataaaaaaacttgaaggagcccgggatgaggttgctaacgctgttgccccatttgttcaagcgatgttcttcaataacaacggcccgagtgcacttgatgcttctgaaattttcgacaagctgagagttgctccggatacatatttcaagagcatcaaagaagctggaagtatgggagcaagtttggcgttggcgatgaccaaatctctttatccgagggttgacgttgatgccattgatggctttgcatacgggacgagcgaaggagctgctcttgacctcatcagcgatgcacaaaaatctgctgataagatagcagttgatgtagttgagagatttcaggacaccgatcttcgaccgactggtcctgataattctgatgatgaaaagactgatactgattaatgtaccaatgattttgatgattaatgatgatggaggcacaatttgtacaatactgatgaatttatgttgtgcttgatatcttaacttagttcctgatttcttaaaagtttttgtcaaaccttgttgagcctaaaacccgcaaaagttgttaaaaaactttcagtcctcattgactaagccaagaaatcaaacagggcaatgatacatcaagtaagcaaattgaattaataaaaatcacactccattattattgtagtagccccctgactgaaaacttcaaggaaaaacttgaagttagcagtcaaagaggaaagatacaaacgaaatgcctaagcgtaaaatcgacgaaggtgttcaatattccaagaattgttgatgagagtaccgtcttcgcgcttgagtcgataagaacccggccgagtgacttcagcaattatgaacggtccttcccataagggagataatttatgccgatcctgtgttgtttgaattttcctcagaaccaggtcaccgactaaaaaggctcgcgatcgaacattccgattatgataacggcgcaacccttgcaaatatcgagtcgactgaatgaaagctgcttctcgggcttcttctaatcgattgatgtcgtctactcggccctcttcatagccctcctcgttgaagttccgaaatcgtagtgattcaaattccacttcactcaacaacattgcttctgcgccgtaaaccaaaaggaacggcgactagccggtagcccgactaggagtagtgcgtaaagaccaaagtacggacggcaactgatctacccacttaccagcatagggacgtagtcggtcaaaaactcgtgctttgatcccttgaagtatcatgccgttagcgcgctcgacttgtccgttactcatagggtgtgccacggaggcgtaacaaattttaatgccgaagtcttcacaaaagtctttaaatgctccgccagtgaattgagtgccattatcagtgatgatccgattaggttccccaaaccgatgcacaatgttgatgaaaaaatctctagctttatctgctgtgatcgtgatgaccggtttagcctcaatccacttggagaatttgtcgatagccacaaagagatgcgtgtaaccgccgactgcccttttaaacgggccgaccatgtcaagcccccagaccgcaaacggccaggacaacgggatggtttgcaactcttgggctggcaaatgagtttgtctggcaaaaaattgacaaccttcgcatgtccgcacaatcttgtccgcatcggacacagctgtaggccaaaaaaaccttgccagtaagctttgccgacaatggtccgtgcagcagcatgattaccacaaataccagaatgtatatccttcaacaattgtctcccttcctccaaagatacgcagcgctgcagtattcctgatggacttttcttgtacagttcagcttcatgaataatgtaaagtctgctgcgcctggaaatccgctcggcttcatttttgtcttgagggagttcttgtttggtcaaaaattttatgagaggttctctccagtcggcttcaatcatgcttacgccttgagtatccatggcttcaattgcttcttttctgggcacggttggttcataaagatgctcaacgaacacattagaaggggctgcttcccgttttgaaccaaaattggccagtctatcggctgcctcattgttatgtcgaaggacatgggtgagctcgagtccatcgaatttatcttccagcttgcgtacctcttgtcggtaagcggtcatattatcatctagacatgaccactctttcatgacttgattaacaaccaactgagagtctccacggacgattaatcggcgaatgcctaaagagattgcaatccttaatccatggagtagcgcctcgtattccgccacgttatgggacgcagaaaaatgtatccacaatacgtagctcaatctttctccagtcggggaaatcaagacgaccccagctccagtgcctgtgagcctcttcgacccatcaaaatgcatagtccaatattccatcttttcctctggcatgtcttcttggcactcggtccactcggcaaggaaatcagctaaagcttgtgacttgatcgaagttcgtggcttgaacgatatgtccaaagacatcaactctaaggcctacttcgcaatccatccatttgcttcgcgattgtgaagtatatctccgagtggaaacgatgtgaccaccgtgaccgagttactttgaaagtagtgagataatttcctgacggtaattaagacaccatataataacttttgaacctgaggatatcttgtcttggagtcggctaaaacttcgctaacgaaataaattgaacgttggactttttgaatatggccttcctcttcacgctcgacaaccaggactgtactcacaacctgggtggtcgccgacacatataacagtagcggctcttgtggatgtggcgaggccaaaactggtggagtagtgagaagtttcttgaagtcttcaaaggctttctgtgcttcgggtccccactggaaattgtcagtcttcttcagcaacttgaagaagggcatcccccgctcgccgagtcgtgagacgaaccggctgagcgccgccatgcaaccagtctgcttttggacgtctttttgggagcttggcggtttcatgctgaggatggcgttgattttctccgggttaggctgtatgcctctttgagataccataaatccgagcaacttccctgacggtactccgaagatgcacttttccgggtttagtttcatcttgaaagcacgaatgcttgtaaaagtttcttctaaatccgcaatcaggtcatccttctgcttggtcttgacgactacatcatcaacataagcttcgacattgcgaccgatctgagttgaaaaacatctttgaatcatgcattgataggttgctcctgcgttcttcaatccaaagggcatggtgatgtagcagtaggccccaaagggcataataaacgaggtcttcaagcagtcggattcttttagtcggatctgatgatctcccgagtaacggtccaagaagctgagtaactcgcagccggccgttgagtcaaccacctggtcaatgcgaggtaacccaaaagggtctttgggacaagatttgttgaggtcggtataatcgacaccatatgcgccattgccccgtctttttccaaaccaggactgggttagccagccagtcgggatgaaggacttccttaatgaagcctgctgctaacagcttggttaattcctccttgatcgcatccttcctgtcctgtgcaaaacggcggaatcgttgtttgatgggtttggtgtcttccttaacatgtaaagagtgctcaatcacctatctggggataccaagcatatcggatggtttccacacaaaaatatctttattattctgaagaaaggtggtgatgagcgcgctttcctatttacaatctaactcagcgcgtattacagcagtcttatcaggatcggagggatctaagggaatctttttcgtcttggcatcactttcttcggtcttcgtcagcttggttgcaggcacttctccctcgcttgccgtggtctcagccagtcggatctcttcgcaggcgagagtagtctcgtgggtttgggccatctcgcaactttctttgtcgcatgtgacggcctgcttgatgtcgctccatagtgatatgactcctcgaggaccaggcatcttcatcatcatgtaggtgtagtgtgggatggccataaatttagctaaagccggtcgtccaagtatagcatgatatgctgtctcgaaatcagcaacttcgaaacaaacattttctgtgcgaaaattctcccgagtgccgaagctaactggaagagtgatctggccgagtggtgtagctgacaatcctgggataacaccgtggaagggtgtattactcggctttaattccgtgcgagaaatctgcatatcgtccagggtcttagcgaaaagaatgttgagtgcgctgccaccatcgatgagagtccgtcggagcttgacattgcgaaccactgggtctagtaccagggggtaccgcctcgggtggaccactcggtcgggatgatccgagcggtcgaacttaattgctatctctgaccaccgaagatattggggcgtgttaggctgaaccgcattgatctcacgttctgttagcttctgttttctcttagactcataagccaggggtccgccgaagatgtgattaagttctttgcgatgatcttgaaaaccagtcggggcatcgtcttcatcatctttcttctttgatgtgccttgatctccgtctgaaggtttacgtgcgttcttgacgtattgctccgcgaactgtttgtagacgaagcaatctttggccacgtggttggagttgggatgatgtggacattgggagttcaatatcttgtcgaaggtgttgacgcgggaacgttgtcgggaagatggagaggtggtcgccacaagttcttcgggcttacgcttgcgatccttgtggttgttacttccactccctcctgcggtcgccgtgtccttctttggcttccaagtggtgcccgactgtttggacgcggtaatagcatcttcggctttggcatactcgttggctttttcgaacatctgcttaaccgtcctgggaggtttacgtccgaacttgccgactaggtcctcgtggcgaatgcctttagtgaaggcggcgatgatgacgtcgttggtgatgtcggagatcttgttgcgttgttcggagaagcgtcggatgtaatctcgaagggattctccagacttctgaacgacgttgtagagatcaaactgtgtgccggggcgttcaaaggtgccctggaacttggccatgaagtgatcacgaagttccgcccatgatccgatcgtgccacggggtagtccgtggagccaggatcaggcggagtccgctagggccacaggtagatagtttgccatggccttgttgtctcctcctgctgcgcggaatgcgagtccgtagacggtgagccaagactccggattagtggtgccgtcatacttctcgattccagtcggcttaaagccggctggccaatccactcgacgcaggtcattagtgaaggcagctactccatccacgtcgtcgtcgtagtgatttggtgaatggcagtgacctcgtgctgcacggcactggttgatcgtgtcgcgaaggtcgacgggacgctggtgaggtggagagcgaggccgttcgactcggcgctccctgtgacgttcgggaggcgagtgaacagatcgttcgtcgtgacccctgctcctgcgactagatcctgtgccgatgatgctgaggcttgtctgatgataatcatgagatcggaggtgagggactcagctaccagtcggggtacgggtgcttgcggagttggctggaaccgaggcagcgatcatggtcttcgtctggttcaagatgttgacaacatgatcagcttggttgagtgcgtcttccttgaggagggtgtcgaggagagtgattgctgcaaccgcgttctattggggggtgcgaaaaaccgctgttccatcgacgtcttgttgcccaatgagctctctcgctcggcacccagattccaaggcgcgttgccgtcgatcttcagcctcctttgcaatctgttcgcgatcttgttgctcacgctgtagtcgttctcgctcctgtcgctgtcgctcttcgtccagtcggcgacgttcagcttcttgccgtgcgcgatcttggtccgcttctcgggcttggcgttgttcctccgtttcgttgtcagccatgaatacgccgaagaagaggggcgtgtagttatcctcatagctatcgtcgaagttgtcgaggtcgccgtggtcgtagtggtagccgaaatcgtcgtagtcgaggatctcggttggtcgagaactgacgccgggggagctaaggtaaccatccaactcttccgtcgagactgtcccaagaggttggagtataacgccaacctctctggatctagattggatcggggccgaagccggagctcgcctagatcttcgagtgggagatgtcttggcagtgaagacagcggccaaatcatcaggaagtttcatcaagattgagggataggacccgtcgtcttgatctggtcgcggaagagtagattggatctcgtccgagtggtttgaagccgactcgggagagatgatcttggagtaggcctcggccgagttcggaataccgaatggcacggggacctggtctcttctcgactggtttgagtccgagtcaaggagagagatcttgccgaagtcgttggtgatgaagttgaggctgccgaaccagaacgcctgcccgggagggaaggcgaagtcgtcgatgccagaaacgaaacccatcgcacttagtcggcgagaacttgacgctacccctacctggcgcgccaactgtcgaaacaagatttcggcaataataaaagggggtggctatcaaactaggaaagtggatgggtttggagacaaggaattttatacaggttcaggccttcttattcaagaagtaataccctactcctgtccggggatgattccgccgagtgtgttattgattgtatgattgggagaaaaagaatcgccccgagaggaacccggacccctccttatataggggaagggatccgtaatacaaagtacagtccatatcctaacggaatatcaatatttggtaccgtatattctatctatatttggtaccgtatatccagctggaatataaccgccatgtagatatggggtaaccataatctccacactatttttagaataagatttatgttagggttatggatactatatacctaatattaatcgactaaactcgacggagccaccatatacccagtcttatacagaatcatacctcgtatatagaatgagttccgaataaggaatgacaaatagagttcaagttggaaacgacaagtactactcggatcatatctatatttatctccttagtcctacttggacaaggggacatttatgggtataaatacaagaccccataggaggagatgggagacatagatcaacacaagacaagctagaacaaaccaatacgccgccaaacatcgacatcagagattagcctaacagacccaatctggtgcctgcggaggccgacaagagggatctaacgccatctctgatctcgctgagttcatattcaaggaaaaagactaccatatcatcgactacgtgttggtgttcgtgccgccatgtcgatgatagctagataggttatcccaaatatgatactcatgtgattcagatgaataaagaggaacaccggtttcggccaacaagagtaggttgttaccttcctgtgaaggaaccaaacctatgtaaaaatccttgtctccgtctcttttacctcaagattgcatatatcctaataccaacgaactccatactatacaaataccatagtcgtgatctaatacgccgataatttaaatattaaaagttattatattttaaaacaaaggaagtaatacaaacttttaaaaaatatttgatttttttaaaataaacttctttgtatatttttacacgaaatatgtcgttaaaaaagtgtgttcataaaaaaattgagagagcatcaaagctgagtaacggaataaaacaaccctaaatgctttatactacctcagttccataaaaaacgaatctaagatcagatgtaatatattatagcactattaatttggatatatgaatgtacagatttgtagtactatatatgtccagattcataatactaggatgtgtcaaatccagtaataggttgatattttataggacagagggagtagtttgtttttacatctcctggaagcttttactttaggagtatttttttttacacattttacaaattgttgaatggtactccctccgtcctaaattataatcatttttagcatagtgtcaagtctgactattaattgcaaagaaataaaaagaaacaaactatcataatatacaactctttttatttaaaacatcttatttttataaatattgttggtcaaagtaccacctcgaaggctgtggcaaagtctaaaagtggttatattttgggacggagagagtattgttctttatatactgtatttatgtttttattttaaaaaatcaaataattactcctcagagagatatgtctagattcatactccctctgttttagattataagacgttttttactttggctaaagtcaaatcgtgttaagtttgaccaagtttatagaaaataataacaatattttcaacccagcacaaatttattgtggaaatatattaaattattgatttaataaaactaatttaatattataaatattactatatttatacataaacttagttaaatttaaagtagtttgactttgaccaaagtcaaaatattttataacttgaaacagagggagtatgtcccattaagttttaatttgctaaagtatattttaagacatatgaagtaatttattttatttttgtgtaattaaaagttaattaattatctagtaatgattcgccaatcccaccctccatgcctccatgccggccatgattcatttagctaggtcacgcctaccgcgactgctccgatttgaaaaacatgagtaattaacttaagattcgaaaactttcaagtacaggtttaaaaaaattaaaaactttcaactcaagatttaaaaacttttaactcgagatttgaaaactttcacgttattatgatttaaaacttactaattaacgtgaaaaaaatcagaaaaaaagaaaaaatatcgcgaaaaaaaaagaaaaagacgtaaaagatgacgtggtgggggccgtgcgcgccaattagcaatcctgcacgcctaccgcgactgctccgattcctccaggagcaacggacgacggtttggctgtgttctgttcacctccagcaagggccgcgtgcggtaccgatcgatccatgccgttccacgtctgccgcatgcacgccacccacagccttccgaaacgtaagcatcatcggctcaccagtcacgacctttacgtaccgctcgatcgatcaataggcccatcacgtacgcaacggcaataatctaggccgccggtgaactgcttgagggctcgagctcaacacccatatgccactgcatttacacatgggttcgttgatcatcgctccggtcacgggtgacggcaacactgccggtagtacttggcttgtaaagattggacacgattgccttgaatttatgatccggttccatcaatcgcgattcatagttagtttctggttaacaggaggtaattaagtcgcggtttacttcaagtgtttagtatatatcctcattaattctatccctcttgttcgctctagagttgaagttttagttgcgacgtcaatttgcgtgtactagctatcacaatcatactgacggagacatcaattaattattttttttcctactatagtgcgtgcacacagtaatactccgtactactataggtctgtttagatcgcaacaagttttttcatcttgttacatcgaatatttggatacatgcacgaagcattacatataaacaaaaaaaatatttatacagattacgtgtaaattgcgagacgaatcgtttttaagcctaattgctccacgatttgacaatgtggtgctacagaaaacatttgctactgacagattaattagtcttaaaaaaattaaattttcgtccctccgcccagggaaataaaataaaataaaatgtgcgggcgtgccagtgtactaagtacacaaaaaataaagtggacgaaggaaaaaatgcattttattataattctcgaagaattacaaaaaaaaatacagaatcctcggtcaaatacgctccacagcccataagcaaggtggatttgacttggcgattatgatctcctggttcccggggtctcggaagacacccggttaattactctcgcgggttaaacccgtgagatacctccgattaagctacactggtcgtcgtcctctgtcttcgcttcacgttctcccatgcatgatggtggtggtggtgtagatgtgcgtgagtgggcgccggcggtattcgcggcctcgtcggtccgcacgccggtgttggtgacgtcgtcttgatgtcgactccgcccgccctgccgtttagcctcatcggtcttggacgacgtattggtttatattgttgttgaagaatgcatggaattgtgtagcttggatgacccgatgacgcaggaattgcatcggaattagattataaaagtaaaatgatcaacgcgaataatagccgaattggtcgtggcttggaagtttaatacggagcagccccaaatgagtatgaatctgcaaactcattttgcttgtcaccgtgtacagtagcatgcatgcatgtcttgttttgttggcttgccaccgtatacaatagcatgcacaagacagtcagcatccgcgacataggacggctctgcggcgtagcgccctggcggctgccttgactccctttggcgtgctccggtgaggcaaaatgacaaaaaccttctccggcaagcagcggatgatggcgagcatcgcttggcagcgttgcatcgtctacggactcaggcggctcaacgacgtccccggcaactccgacgagatggcttgcgacgtagctggagctggtgacgccttgcgggcaccgagtagtgacgctccggccggcattctcctcgagcaaccagccgatgagttcgaagaagatggtaacgtcgacgagagcgagcggacgtcagtaatgtagtgtaggggaggctgcgaccggcaaggcgacgacgtccaacgtctcggcgacatcacatcgccaggtaaagacgtcgtgggatagaggttgtggccggagctatttggatagaaaaatatatttttgcaggcgggttttttaaaagtctgcccagaagtttaagttatctcctctttccctgtttaacacttcgatttttttcaactcatcctctctctcctaccgcatccttatctcctctgcatactcttctctctctttctcaaactctcccggccaggtaagtggcggcggctagcgggagcacggcgaggggcacgtggtggcgggcaagtgggcagtggcgacgaccgtgccccgcccggatccagcggtagtggcgggaggagcatggccgcgttagcggtgggagtagcctggcggcggcgggaggaccccggcagaagccggcgcgctcaatttttgtgaatttattttggatttttgttttcgcgtgcagacgacataagcacccaaacacgaaaaatcgatttttgcgtgagggtacaccacctgcatgaaaaagttagattttcacggacctttccagctccacatgtcaaaaccacttttgacccggaaaaaatgtttttatattagtgaggtaccaatactcagctactttactcaattgttaccgttgatacggaaacaagtggaccggatcaaacttgacggcgattggttattaaagcatacgcaaacctcaattgaattacgttgtaccagtgccaatttgggaacgacagggctggacacttggacaaaagttttttttttcctgaaagaattcatgattagactatagagtgggtaactgggtactgggggagagaaatggaggataccgtatatccatgttattataggggacacaggtatccctaaaaaaaaagggggacacaggtagagtagatcgtgtgcagaattattaggggacaaacaattgccggaataaacagttactagtataagccaatagactaatattcattccgtctcattttaaacacagccatcagtttccgttccgacttgatcgtctgtcttatttaaaaaaatttataattagtatttttgttgttatgatatgataaaacatgaataatactttatgcgttagacataaaaactcaaagaattcacagttgtgtttaaaatgggacggagtgagtagtaattagtaacatgaccgtgatagtccttttattactcctactagatcacgtctcattcagcacagttgcacaggcttttgttgcacgccattttcgccatcctcgtttcatttaaacatgccagtcaaattttctttatgaaccaaaaactttaggtaactgatgattctgctcaactgccagtcatgtttgctgggattattggtaagccctataaacgtggggttttgttttcattggtaataatacggactggtggtcaagctatcagtgaaggacattgtaaaggtagccatgttggttgtggcacaacctcaaagctgtataaatattctgatgaagctgtcgataaacgtactacagtcgaacaccgagaggccggtgtactacatattccattttttagtgcacaacctcaaagctgtatactatggcctggtttaggggggtgttatagatttaggggtgtaaaattttgacgtcttacatcggatatatggacacacatttgaagtattaaaaatactataataacaaaacaaattacataatccgactataaactgcgagacgaatttgttaagcataattaacctatcattagcaaatatttactgtagcaccacaatgtcaaatcatggagcaattaggcttaaaatattcgtctcataaattagttgtaatctgttcaattagttattttttagcctatatttaatacttcatacatgtgttcaaacgttcaatgtgacagggtgaaaaattttggagtgagatctaaacagggccttagttcctaaaattttttcccaaaaacatcatatcgaatctttggagacatgaatggagcattacatatagataaaaaaaactaattgcacagttaggggggaatcgtgagatgaatcttttgaagctaactagtccatgattagccataagtgatatagtaaccacatgcgctaatgacgtattaattaggctcaaaagattcgtctcacggtttttaggcgagttatgaaattagttttttcattcgtatccgaaaacccttccgacatcaggttaaatatctgatgtgacacctaatttttttttctttttttgaactaaacagaccctgtatatgttatccggggaggagacaagtaaataagagtcggcaatcagcagcagatgggtaagaagtaagaacccaacgatgattatgttttaactgtgctcaagctacctaacgagaaaattgctatgcatatgacaaccgtccgactcacgtacaactaaattcgatcaatgttgtaaacaattacagtgcatatgaatatgttcttatttaattgatttatgattgtatatttgtagtaataaatgagttgtacaagtagatcgtatgtatagcaacccacgacgcagctgaaacggaggtacggttaacgcagacaagaaaaatgtcgcatgaatgatactgttttcctctcccttaaaaatggagaggttctgtttggctctaaacagttcatgccaaactcggtgttggccatgacagtacgatttgtttgtgatgtacgagccattccctaacggcgacaacattttgaagctctgtctcttccactgctaatgtggtccgtgtcatggtgcgcatcaacaaaaatcgttgttagagcttctgttaaatatatgtaaagaaactagttacattttgctcataaattctattaaatgtcaggattacaaaaattagtcaatatttgtcttaaactctctcttgaatatatagaagagggacaataggttagtagcctagccgaccgatggtcgtgaataccctactacgctaaaattatattggatctaggagaagtacgcacattaagtgttttggagatataggatttagttgaacctcgttaataaataatcacatctcaatagcattatcatgtttagatattttataatatttttcacattcggttaccaatatcgattttaggatcggttttatagcaattatacaccacatattagtactaatatgcttcgtaggtcttgaacagttaaacttcatttccatgtgtaggattgaaatttatttttgcaatcggattccctccagttctctcttcttcagttttccaatacgggaacagcggaacagcagctggtgtttgaaatacttctaagtcatgtgcctactactgtagtagcgagtagtaacctctattaatctctcactactagaaaaacgatctttgttggatcgaactaaaaccacaataataaagatgatctttagtcccggttaaaaaccccacagctattttatgatttttaatcccggttaatatctttagtcccggttcattccctgtcagtaggatgtcagggggccgaggatctttagtcccgattggtgacaccaaccggaactaaagatcatctttatagtcccggttggtattatattgaatgtttggacatatgtataaagtattaattatggacaaaataaaaaaccaattacacagtatgtgtgtaaattgcgagatgaatcttttaagcctaatggccataatttaacaatgtggtgctacagtaaacatttgctaatgacggattaattaggcttaataaatttgtctcgttgttttctggcggaatatgtaataaattcgtctcgttgtaatttgttttttggcgaaatatgtaatttgtttaacactttaaatgtgcgtccatatatccgatataacaaccaaatctaaaatttttctccaactgaataaggcctacgtgcatgtgtgcatgcgtgacgatgtcatgcttgtgtgccatcggtggcgcgcggctggaccacgggaccgacgcggtggcgcgttaccacggtgcgggatcgtcccggctatcggtccctcgcgtccacgccgcgcaaacgaactggtcgcgcgccctcattccgcggcacgcatatattttcacatctttttcaaaaacacgtgtataactgcaaaaagtttaaaaatagcgtatattttcaaaaaaaaaatcgtattattcagctgcttgagatgcgccgatgcctaattgcctattggctcgttctggttaaattcatcgtttcatcgcacggtacgagcacatgacacggacggactggctcacttgactggcttcgttaatggactcgccacctcacctactcaccaggcttactttcatcaatctcactggcttctctgcagcctctgaaccggggaacagaagccggggcctgggcctgggcctgggctctcgcttctttaaattctcccactccttcactcgcttcgtacacgagagccaagctgcgacgccactcgagggcacgacacaagctgacgtttcccttaacccaaacggcggcgcgaggaagcagccaatcaatttcctcgtagaggcatgacgagctcgtcggggcagctcaagaggctgaagccgctgtaccagctggcggtgaacaacatcctcgccgtcgtcgccgtgccgctcgcggcggcggtggtgttgaaggcggcggagctcgggcacgaggagatcctcgccagggcgcgcgcgctcccgccggcgcacctgttcttggccgcgttcgtcccggccgcggcggcggttgtctacctcatgctccgcccccgcgcggtgtacatggtggactacgcgtgcttccgcaccagccccaactgccgcgtcccgttcgcgacgttcctggagcactcccgcgtgtggccgggcttcgaagagcggagcgtccggttcatgacgcgcctgctcgagcgatcgggcctcggcgaggagacctgcctgccctacgcgcagcactacatcccgccgtcgcgcgacctcgagtcatcccgcgccgaggccgagctcatcatcttctccgccatcgacgacctgctcgccaagaccggcatctccccccaggacatcgacatcctcgtcgtcaactgcagcctcttcgccccgacgccgtccttcaccgacatgatcatcaaccggtacaagctccgcaaggacgtgcgcaacgtgcacctctccgggatgggctgcagcgcggggctcatctcggtgggtctcgccaggaacctgctccaggtcgcgcccaagggcgcgcacgcgctggtggtgtccacggagaccatcacgccaaactactacatgggccaggagcgtgccatgctgctgcccaactgcctgttccgcatgggcggcgccgccgtgctcctctccaccaacggtgccaaggcgcggttccggctggcgcgcgtggtgcggactctgaccggcgcccaggacggtgcgtaccactgcgtgtaccaggaggaggacggccgcggcaacgttgggatcaacctctccaaggacctgatgagcatcgccggcgacgcgctcaaggccaacatcacgaccatgggcccgctggtgctcccggcgtcggagcagctcctcttcgcgctctccttcatggcgcgcaaggtgctgagcgggcggatcaagccctacatccccgacttccgcacggcgttcgagcacttctgcatccacgccggcggccgcgccgtgatcgacgagctgcagcgcagcctcaccctgtcggacgagcaggtggaggcgtcccgcatgacgctccaccggttcggcaacacgtcgagcagctcgctctggtacgagctcgcctacgtcgaggccaagggccgcatgcgcaagggcgaccgcgtgtggatgatcggcttcggctccggcttcaagtgcaacagcgccgcgtgggagtgcatccgccccgccgccaacgccgacgggccatgggccacctgcatccaccgctaccccgtcgacatccccgacgtgctcaagcactaaccgagtcactcacaactccagcatcctctctgtgttcgtgcccgatcacaatcgattcgtgcaaaaataattatcactaacagtttgagagacaccgagggctgacgtgtgtagttgccgcggtgatcgtcgtgtcaagacaggtcatggtacgtctgcggcgcggcgcggttcaggctggtgcgtctgcggcgcggcgcggcgcgacgcggggggggggggggggggggggggtttaattggttcgatcgctttaccactcgcttcagctgaagtactccatatattgatacacaagtttggtgttacccgtgatgtacttagtagtggtcccatgtgtctcgcttttattttctttttctcttcatttatctcttccttgatgtactgatactgtttatcacagggaaaagggcaccatcgatcactctatccaaaagcatgtaactttgacagaaatgaaacttccagcggtacaaagttgctcctatactgtaaagcagacctatagttgcatacattcatgaagaatctagtaaggtctggcatgttcctgaatgttgaaaacctgcttccctgtgttaattcggtgacccacgtcgtccgtcgatttaccgcacgcacattggctgattggcagcgaggatgctgtgccctgcaagcccgcccccgccatgtcaacatgtcacccctcgatcggtttttaatccctccagtggcgtcgcaggctcggatttatggccctgccggcagccacagtgcaactgcgcataatggctatactagcgtgtatctagcgcatgaattgaaagcgccggtacttaacagtaaaaacaccacagtcatgtactgtcgccggcggtccgccctgcgcacctgagcgcatggaccgtccacatcgagcccacgcgggacgaggacgacatcctcctctctgcaccagcagatcagaacgcaatggaaagaatcgatcgattcccttctctgctcctgattcctgaactccacgaggattaacagatcggtgatggtttcatttcctgtgttgcgaatgcgagcccccacctgaggcacgcacggcaccgccacaccggcgtcaagcgggttggcatgtcgttgtcacgcgcccgcgtctccctcttctgttctaatccccatttcataaaaaaaaccaatctagtatcggaccagatgtgacatatcttaatactacgaacctgaacatatatatatctaaattcatcgtattagaatatgttatatccgattgtagatttgtttttttacatgatggagggagtacctttcgctttcttttttctgctggcatgcatgcatttgccaccaccggaaacaggatcatgatgacttcgatgatcaatcatcgacctgtagcggagtaaatggctgcaaagctctatccaatccagcaggcaggtactccctcggtcaaaaaaatcaaatcctgggtttccgtgtctaactttgaatgtccgtcttatatgaattttttttataattcgtattttcattgttgttaaatgataaaacatgattaatattttatgcgtgacttgtctttttatttttttttcatatttttttaaatataagacggacggttggacataaaaattagggtttgccttttttttcaggacagagggagtagtattttactactgcccccacccccagtggttcgtgtacggtgatgataaattagtgatgaagctgcttgtcactcctcataaacggcaccaccgtcaaataagaaccatcgccaccactttcagtgtcggacagtagagatggagaaaggctgctagaaacgaacacacactcacaaaaaatctgcaatgttggcatgaccacatatagtctggcctctgtataaagcacaaatgatctgaaaatgtgcaaaattatcggcacatgcatctacactattatttacgtgccaactgcttctttgactgcacgatgtgtacgtctttccaaatatgcatatgtagcaatgtgcatatatacacacacaatcacgcatggctgtatgcaactatatgcatacgtggggattttggctccgaggagatgggagcctaaacaaaataactcggaaaaatcggcttcttcggaaacaccgatatatatttgtctgaacctatgcatatgaatagggctatcaacgagccgagctagagcgagctcgcccgcctaggcttaagccgagcctataaaatgttcgagctttcaaacaggctcggttcgagctcgactaccgagctcgatttttaattagaacaatgtatattttaaaggataattttttaaaaataactaatttatggtttatcatattagtagaagaggaaaaaggataaaataaatatatgatgccaatacaaggcatacaaataacatatttgatctactaatttattaaatagtaaaaaaaatcatatattactagactcgtttgaagctcgagctcgactcgacaaagctcgcgtgggacaggctcgggctcggctcgtttggagctcgagccgagctcgaatcgagtttaggatgagtcgagctcgagcagcttgcgagcctcgaattttttttgacaaccctgtatatatgaacaaacaaatatatgtgaaatatgtcaactgttcgtcgatgctggtgatggcagcatgcatcttgcctgaccatgaacgttggttgccttgtctcattgcgaaactgtaacgacgttcctgatgtgatgtttcgtcggacactccgtacagcaaggctgcctggtgcacagtattctgagatggtgttcaagctgaaagtcatcagtactactgacatactttaacagttgacatcagggattcgtacctgtacatgaagatcggtgcatcaattcgcacaagcacacacaagcgcacagcactaaggccatgtttctttcagtttgaaattattataatctaaattattaagtcagattactataaactatattattataatttgtagtagaataaacggttagttgtttctttcctagattattagagcctagattattgggtttgcaagtctaaaaagggagtggggtggcatggtgggtaatttttcacccaataatctagaaaaagctcacctaaataagcttatcagattataataagttgggctccagattataataagctacttcaataagttgtctgtttctttcagcttacttctaataatctagattataataatcccaagctgaaagaaacagcgcctaagtataattgagagctttttttcagaacaaagcacaatagtactactccttagcagttagtgatccttttttttttttgacggagcagttagtgatccttaacagttagtaaccctgttgcgcgctgtgtggatttcttcagggacaagggcgccaagaactccagtggatagaatgtgggctgggcctagtccactactgggacaggctcgcacctgtcatggtctcatggaccggtggtgttacaacggctgtgtactgggtccagctctgcatatctgggcccatatgttattgtctcttggaataagatcactttgactccctcaactgaccatcaaatctaaattgtatctctcaactgtaataccagaaatctttgttagaataggtgtcgaatatactagtcctatttggttacagttggacttggagttataataggtgttagggggtggagttagagtcggactctgtaacccggcatctctcttaaatagagagggggcaccacaatgtaaccatggcgactacaatgtagcgtagacacgcagggagaggatggcggcgatgccatggactcgtagcggctaggagctatattggttggggaggagcgcccataatcagagccccggggatgtatgctccggctgaacctcgttaacaaatatcatgtgttcctgtgtcgttatctgacatgtcttgggtgatcgatgactgaagcaatcgggaaggttagtcgtcgttccgctatatcgactaatttttataacaagtggtatcggagcataaggtttcagcattggatcaagaagacatgtggaggaggaaacacgaggtggggatcgcgcatcgacaggagatcgtcagccgtggcgatgagatcgatggcgacaacgaggacgttgcggaggcggcgagctcgctcgcgatcagaccggcgatggcggaacgtgaccggaagacggggccgggcgtggccgaaggcgacccgagagattggaggggtagcgccatggacggcgcgcccgacgcacacggtgatcgcggatccgcggcggcagtaggccagtgacggaagggcgaaaccgacgagcgtggcgcggcgcggcggacgtggagggccgggacgacggggtcgtggatggtgaacacaagggctgcgactgcggtgcgtgcataggcacggacagatagcacaggtgctgtcttatatgtatggcgtgcaaagactaactagcaaaggcaataagaaaaaccaaatcgagcaggatacaacaatcacatgcgcatggacctggaagctgcggtcttggagattgtacatacttcgaaaggccacgtgtatatgcagttggcttgcattgatatatggctatcgtacagatcaaggagcagcactagcgtctgcatgcatgtgtgtttattgtatggcagggccatgaaaaaaagctgacagagagagattggtgggccaaaagaaatcggctggaggagttggcggaaaaaatcgacttgtcagagtcggatatggctaattcgaccgcagttgttacggaatcggatgcagtcgtgtatggacaccgactcgtggccacatcgatttcctattggttgtgctttaaataggcagccaaggagggagacgaaccaaagcaacaagaagtggcagcgtttttgaaggctacacatctcggcgtcagcaatcaagcgaagcaggtggctcggcgggattggtcaaacgttgtacaaggggccctataggcttgctgtgtagaggctcgtggcaaagcgcacacgtacgggtggaccaagccaggccgacaagatcgtgcggagcagaggcacatcgagggcggaagattggtcacatcggattatagcgaacgggggtttgctagtctatgtctgagatcggatcacaagacgagattgtgaagacgaatacagacggtactgagaaaggcgagtattctggtggcgacagaccagtcaggtcgcgggttggcaagatggcgccgacaggtatgaaatttgatttggtgaagtttgacggctccagaaattttggcttgtggcaaactagggtcaaagatttgttagctcaacaaggagtttcaaaggctttgaagggtgtcaaaccggccaagatggaggatgacgattgggaggagatgcagttgcaggcggctgcgacaataaggctatgtctctcagatcaggtcatgtaccatgtgatggaggagacctcaccaaagataatttgggaaagttggaagctcagtttatgtccaagactctgaccaataaactgtatctgaagcagaagttgtatgggctaaagatgcaggaaggggcggatctgacagcacatgtgaacattttcaatcaactagtcactgatcttgtgaagatggatgtggaagttgacgacgaaaacaaggccatagttcttttgtgttcgttacctgaatcatatgagcatgtggtgactactttgacgtacggcaaggagaccatcaaaactaaagatatcacttctgcgttgctggctcgtgatcagattagaaagaacaaagagggtgaaacatctcaagcggagggtttgctagtcaaagaagatcatgctgggcataaggtaaagaagaacaaaaaaagaagaagatggtgcagtgcttcagatgtgatgagtgggggcatataagcaaggagtgtcgcgacttcatcaaatgactcggatagcgatggttgtgatcttctcacgatgttaagtgcacagtctaaggatgcagaagcgtggatattggattcagctagctcgtttcatgtgacgccaaggaaggagtggttctcttcatataagtctggtgagtttggttttgtctacttaggtgatgacacaagttatccggccatgggagtaggtgaagtcaaaatcaagctagaagatgaaggtgaacatgttcttcagggagtcaggcatgtaccagggctaaagaggaatctgatttcgcttggaaccttgcatgaagaagggttaatattccgcggtaatcggaataggaagaccattgagatcatgaagggcaagatgactgtgatgactggagagaaggtggagtcgcatctttacaagctgcgagggtgcactgttgcaggtggagtctaggaggaagcagttgctgggatagcaattgcttttggtggcggcgggtctggcgcagactcgtcgggcggcttgcggtgaagctgcaaagaagacaacccaagtctggaggaccggtggatcggcatggtgattctactacttctaggtggcgtatattcgccaaggtggagtttgttagaatagatgtcgaatatactagtcctatttggttacagttggacttggagttgtaataggtgttagagggtggagttagagtcggactctgtaacccggcatctctcttaaatagagagggggcatcacaatgtaaccatggcgactataatgtagcgtagacacgcagggagaggatggcgacgatgccatggactcgtagcggctatgagctatattggttggggaggagagcccataatcagagccccggggatgtaggcttcggctgaatctcgttaacaaatatcatgtgttcctgtgtcgtcatctgacaagtcttgggtgatcgatgactgaagcgatcgggaaggttagtcgtcgttccgctatatcgactaatttttataacaatcttgacccccgaacttacaaaaccggtgcaatttaacttcctcggtagttttggagggtggttttgctgacgtggcgcatatgtggcagtgttgacccggtctttgtgccacgtggcattgacatggcgcttatgtggcattaaaataaaaatatatacgcagggcccatttgtcattcacacaaaaaaaattataggacccactaacatgtaggtcccacgtatcatcctctcttatcccttcttcctcctctcttctctatctctcctttctctttgtgcgtggggaggggcgtccggatcggcggcagcgacggcgggcgatggacggcacgtgtgcgtgcgcccgccgccgccgccggggaaggcggaaatggcgggggcggcggagggagggagcgaaccctaccacgaggcgccaccggtggacggcgatcaacatatctcctcctccacggcatggcgtggtggcgcctcgccggagtgcgcggcggcgtgtaggcgtagcagctcagctcaggcttcgtcctaactctggatcccaatcccccatgcggcgtctctacctctatcaatcaggtcaggctccgatccccattcgctcgtgctctcgtcggcgtggagcagcaagtgcaagaagctgggcaggctagccaagatgtccagcgccgacgtggaaggggccgagaaggtggaggaactccatctcgtgatggaagagtagctgcctagctagagcagcaagtgcaagaagctgggcaggctagccaagatgtccagcgccgacgtggaaggggccgagaaggtggaggaactccatctcgtgatggaagagtagctgcctagctagatgctgcatgtttgattggtttcaagtaatttcatgggtcttttgttttttgagacagtccattttgctcagtttgatgtagtgatgttcatggcgtacagagtctgagcaaagtctgaggacttctctcattttgcttagagagaattaatccattttgtgcaaggtctgaggacttctcaagcagatgattttaaccaaacattgcaaatgattttgtgcagagcctgccgccggctcatgtaagggcgggagagagagaaataaggagagaggaggaagaagaagggtagtgagagagaggatgacatgtgggacctacatgttagtggatgccacaattttttttaatgacaaatgggcccacatatatatttttattttaatgccacctaagcgccacgtcaatgtcacttgggataaagaccaggtcaacattgccacgtttgtggccacgtcagcgaaaccgccctccaaaaccaccaagggagtcaaattgcaccggttttataagtttaggggttaagatttctggtattacggttgagggatacgacttagattcggtggtaaattgaaggagtcaaagtgatcttattccttgtctctttcttgtgatccaaatgttctgccatagagttctacgtggggggaagtttaatttgcatccctcctcatatgtgggttgagtttcaatcacatctcccaacccaaaaccagatacaacacatctttcatcacctaaaaccaggcaaatgtagtcttaaagacggtattgagagagcggttttagttgtgtggcattcacgggcatattaactagatcatccgcgtcccacatgacgtctacgtggcacttatagtaaacaacatgaaatgtgggacccaagtgaggcccacatgttagggactcacccttctttctctagcctcccctctctcctctcttcgccatctgtctccacttctcacatgtcttctccaagataacgttcggcaggagaggagcaatgcggtggtggcatcaccgagcagcgtagtttcatactcagaggattctgaaactttaaagaaatctatgacgaacaagtggaatcatactggaacaggggagggtgaaaatggaaggcgcagatgtgacaatattggttggttaatgatcatcggagggtgtggaagcatgtggtcctgagtcctgacacgcaagcaacggcgcctcgtccggagaggtggaggtcgagcaaggtaggcggtgcccctcgacaaccagacgcagcgggaagttggtgagcttgaagatgcttaagtgacaacgccgaggagccctcgaccagatctggagaagctccgagccgctcctaaccccacccctcatgagctcaccaagtcgggcttcgtctgcctttcctcatgacttcgagctcgagatccatagtcgccgtcgagtggttgagctcgagtcttgtgccgtcgcagctaacctcgtcgactcttgttctgcaagagcgagacatatagcacgaatcttagggcatgtttagcactggagctggagctcagccaaacagtttcagctccaccagaactgggagtggagttgggtgaagctctctcacaatatgtactagagttgtggagctgggtttaggcagctccacaactccattccagactcaactcctgaagttatatttaagagttggagctgtaccaaacagacccttacgatcaaaagaatgcggcaggagtgctaggagtattctacggaataacgggtatagatcgatcaggaaactcgtcggaaacaaaggccggcgtgagctatactatagcataagatagacagccggccgattgctgattcctttttgttcctctccgccgcgcacaaataatggcaggcgtgtcggacgaccggtcggatgcatccgtcgccccggcgttgcgccgttgcttctccgcacctgaccgtatcgaagcaggggagttgggaccagccaaagttgacgcgccccacgacggcaactaacgccaggccagactgtgcgatcttattagcctgtctccaactataaaacccatccgtttgccacccttatccccgattccctgtggcctgtctccagtgcaccgacgtgtgctgccattaccgggatcattggatggtattatgtgttttttatggtaagtagtgctagtagtttagtgttttatacgcgggctgtcggatgacaaaatgcatgatagtagtactagatgtttgtttagctgatgttatatccttttgtttttagaaaatacaatgttatgacttatgagtttctcctattatttatacatgtcaccttattgtgatgttaatattccttctacatctaatataagaataatcttgtgccggagtattaaagaattggtacaacaaaaagatgcacgacccttgctatgatctattatggttagatggaatcgtcaacttcacatcctacatgtatcatgctaattttgcaatatcttatattaactagaaatatcttgctagactgtaacgttccgctttccgtgagacgttaaaaactagtttaataaaatcctaattgcgaaaatttccgttctttgtgtgagagtttaagccgtgccgtggatctcaatttaaatcccgttgttccctctcatcgatatcaaaatcctccacctcaagatttcaattccgattcaagtctccgaaatcaaactccgaatttcaatcgcctcctttgaatccttgccaaatattcgccccgactccaaaaatatccaaagttccattttgaattcttctccaaacccaaatctctccaaatcaatctttcagaaaaagtctattttacctccctcaagctcagtgggccgactcttcctccccggcccatctctccctctcagtctagcccacctctcccctcgcacgtgcgttgcacacgatcgagtcgagagagagcgccgctctctccctctctctctctgtttctctctctctctcccgacgagtttcccccaacgccaaaactcccgccgccgccgtttgaacccgcgctccgcgcgcgcgcgcgctcccgcacgatggacgaccgccctggcgctagccgcgtcgcgcgctgccgctctgccgctgcctgccgcgagctctgcagcgcgtgcccaagccgctccacccgcgcgtccgtccaaaaccgagaggcagagccctctctcccgcttctctccctcccaaaatcggcatggcgcgagccccctttccccccttcgtttttcccctttcctctcccggaccggccccctgcctcctcgctcggttccagcgccatggcagaggagcagccgacgccagcgccagcttgtcgcccgcgccctttgaccgcacccgtgacgcctttccttcccctcaaagcatcccccgcgcctataagagtcgcgttcctctccccctctcgctcggtttccattcgcctcctcgagctcgcctcaccgtgcccttgtcgctgccttgttgccgcccctgccctgtagtcgccctcgccgtccgtcgcagaagcaccagggagactggtgcatgcgaggacgcgagacgaggactatgggcacccctcttcttccccttccccggcccgaggccggagagctcgctcccgcgccgtcggccgctcctcacagcgcccgtctcggctcggtagtgcacactctccgttctccctcctcgctccctctcctccccttagctccgggcaatagtgcgagtagccttccagtagctagttggcgccgccccgaccgccgccgccgctcgccgtaggctcgccggccatcttgctctgtcccggaggccgcctctcgttgtcggcctctctcagtgtccctccgttccatccgaggttgggaatgcattccctcggtcccggtggtgctcccgccgcccggaatcgagccctcgtcgaccgccaccactttccctctttcctcgccgccgacgattgccatcaaaatccgccgctgtcggcttcccttttgtcaattcctcgtgccgccaccctccttgaacccccttgactctccccgaaccgccgccccagccgccggccttctcctttgcttccgtgccgtgccgccttcttctgccgccgcatagcgccgccgcgcgcgcgtcgctggcgaccttcgggtcccgcgtcaccgcgtgcgtgtcgcaattcctttccgcgtcagctaagcccaaccccgcacccctttgtccattttctcgctcatccgcatcggcatcccggcgaacttcgtcactgcagccggccaccgtcctgtcccctctctccaatccaagccatggaatgagttccccgtctcctcctccttttgctggtgcccgcatctccctccggctcgccgccgttcgccggattccgccgcgcgccgtgagccgtccgatgagccgcctggcttcctctcccttcccacgttggcgccacctcagccgtcggccccgcttgaccgggtcaagccggcgcccagtcagccgccccctccctccatcttccctcccgtgcgcgcggtccacggcaagccgtgcggctgcacgtgggcccgccgccatccgtccacccggcgcgccgcgcccgaaccacgcgcacctgaaaccctagcgtccgcccctgcgtgcgccgcttctaccgtgcaccgcctcaccgacaagcgggcccatctcgggaccccgcgcggtggaccgcgcccaacccgtcggcctccctctctccccgcgcccccttgggcagcctctccgggccggccggcccattagttcggccgagccgtgcctctcctctcgggccgcacccaagccgcccgaggaagtctaaatcatatccctccttcaatttctttccaaaaagggtttaataaattattaaatcctttttcctttgattagaaaatccaataaacttcgaaaattcatatcttcccaaccgctcatccgattgaccctgttccacttccagtaattctgtaaaattgagatctatttaatggcactgttaattagtctaaatagggcctttcttttggtcttttgtttaggttttgattgtttgcgtatagttgcggttactggatttttcgtcgatcgcgggttttctcaaagattcgtgaagctccgtgaagaccttgagcaaggcaagtcaccctttgatcaattgctcctataattggaaaatcattattattttgtttgtaacttgcattattagaatcacacacttaatttgcttggcctcggtttgcgtgccaaaccgacggacctacccagtagtctcactaattcctgcaggttgtactaccctgattccttgtcgctccacccttgtggtacttcagtatccgtgctctctaagcacgcataccaaatatcccacatacaccgttgattgttgaaaacttgggaaatgggtttatgaagcctcgaaaacccgacatgaggtgtcggtgtgtttgaaaataaaatgaattgcgaaaactcgcgatgcgggagccgtgcctatgtggcgttgtcccgtattcgcatataaggaccgattcctgtgggaaactcatcgagcataatcaaagtgcaaccacaagttggaatgggacaccctggttaagtaactagtcggttcagggaaacctcgcatgccaatagttgagaacgccggggcggggtcggacaaaccgggttcctggtaaggcaaggacgagaagcttgctcacttaccgatcaaggtggttggaattgatttgtgaatgcctaaaatggcctatacttacgtgaggatttgatccttctatgtggcatgaggtaaccctgggtcggcttgggaaaggctttgtcgcgaacctctgacaccggtcagtgtctggagtaagttcgtgtcttgtgggtaaagtgtacccctctgcagaggttaactaactgttcgaacagccgtgcccacggtcatgggcggatatgaggtggttcccgttgcgtagatttgtttgcctgtgctttgtgaaaagttgttgtggattgggaatcgtaaccagaatcagcctatgtggcagatggatgacctgagtggtcaaaaacgaatctgtgtgattcgggatgtctgcaggcatcatagactaggcttctcgagtggaagcggattgctttgctgctgggcagctggactctaggagtccgcaaaaatgaaaaaggctcctctgggagccgcttaatcaagtgaaatggctctgggagccgagaagtaatgaactgacccgggaggtcggtacattaccaattgagttgttgaaaagcatctcttaagtcgaatcgagacgcaagtctccttttcgacccaaacttaaaaagaaataaatcacttagtgatttcaaaacaaaggatttgcaaaacaaccttacctctcttccaagcttgcattaaacacctaaattcccgtgacttgctgagtacgaaaagtactcacccttgctctatataaatatatatagttcctccgcctcgaagagaagatgaagtgaagtgaagagtagggttttgtcctagttcccagccgtcgcctgtggtgttgggtgttagtccgttagttctgctgctgctgttgttgttggtgttttcctcgtccgcgtcgtcggttgcattctcgggctgttctgagctgcaacctaagttaaggtaaataagtcctttatttattttaaggattgcaatgattcatatttgtcaccgtgggtaccagcactatgtcctgggactgatactgtgatcgcggttttgtaggaagcggttcgcgccgtttttcctatgatacgctcctgttaggtgccattgtacggcggtgccggattgaggtgtgacatagacatgtcgtattatgatatatggtagattgtattggaagtccatgttagctaaacacatgtaattgaaaatcccacgaattctttaattttttagttttcccaaaaacagtattaatttatatctatcttggacccttaattaagtaatctgttaattaaatttctagacatgaagctaaacaattactccctccgtttcatattataagactttctagcactgcccatattcatatagaaattaatgaatctatacacatatatgtctagattcattaagatctatataaatataagcaatgctagaaagtcttataatacgaaacaaatgaagtagtaagttgtagttgatgtagactcttattttgatctaatatgttatactaattttgaaaatgaccacatgttataaactgtccgcgcaacgcatattttgttgactaatttattctaattgattttactcatgaaacattatggtttattggtgtacagtagcgataactaacttaacagaaataacggcatgcaatcgcttattacagtccccattgaaacacatgattaaaagacggagaaatatgaaaaacatatgattttaacaataatacaagtaagtacaaaataaaagattgcaaaaccaagaagaagaaaatataggaatgactatttgaataggttgtggagaaaatgtaggacttaaataagagagaaagacaaaaagaattttttaagagatggaagtttttctaattttctcgacatgcattgacccattcttaatagtttaataagatttggaaacctcttcaattctttgtttcattcatatagatatagaatgctataaaatttcttcataactttttttttcaatgaggcctatatataggttttgtgtcatgtataatgcatgtaaaaagccgggtgatataatcatacaattttggaggatatatcacattgacctgactttaagtgcttaaacaaagttatgtatatggagtagtagtttaggttcgatagaaaaggaaaaaaatggagaaaatctataaccatacagtttatgttggtcataaaaaatgttgtgtacacggaacatccccagctgcgccagcgtgcccgtccacaccagatccacggatcggctgttcaccccaccacccccggcccccgggctcaaatctgatagggaagctggcagttcaggctccagctagatggacactgatttccccgcatttgtttaactccgccctcttcctcgcccgggaatcactcacgcgaacggcaaccagtgaagtcgcggacaccccacgcccagctcaccccacctcgatccccgccgcgtcgtccccccctccccgcacggctgcaacccacctcgccgagctggagctggagcccagcggcagcaggggacccttccctccccgcatttctttactcctccacctgagctccctcgcactacgctgcgctgctgccactgcactacattacgacgggacgttgacattggcgatggcacctcccctcctcctccccctccacgcggcagagtcctcctgacccacacggccgcgccgcgcgcgctgcgcctgctgaggcgggagggagcgggcccgcccgcgatggcggcggaggccgcggcggagatcgtgcgggagatcgcggcggtgggcgccgccgatttggctgcggccgccgagccgctgcgcgcggactgcctccgcctcgctcggaaggtctcgctgctgtcgcacctcgtcgcggaggtcgccgaggcgggggccgggggtggggacgcggacgcggcggattcgtggttgggggatctggtcagggcgctgcaggccgccaggaggttcgtcgagctcgggcgcgcgccggcgcgaccgtcgagggcgtcggatcaggtgagggcggagaccatttgggtgcgtcctactgtcggcgcaagctgcattgctcggtagttggtgcgattcccccttgcgtgatttcgtcgaacacttggtgcgcatgcttcgggtgtcctgtccatgtgcttcgcttctgttgttgactggcctagtactgtgtagcatttaggattcacgctacctcaatgtctcctgcgcatggtttatattgttcggtggctcggttgtgctacactgttactcccctccattctagtatattttgtgccctagatgcagagggcagagctaattaggtttgcccatatcgacgtatttacaaatcaaacttgttctaaagaatcacaacttgcttgcaacaagaatagcaaaggtaccaaacatcttagcattccgccttgtttcctaccatgcctgcttgttgcattgacaggctgaaatgccactggcatctttcgtgatcagatgcccatttgaaatattttggttttgattgatcatcgcctttgtcatttgagtgctcattataagtccactcgttgaaatatattgcgttgcttaaataatgctgaatacatcattttgatatcgatatatactacataacaagctgatgctgcaatgcatcaagttgtttgtgattgccatcggtatcatacttatgatacttaaaacaacattggcaaatctgtctgtttggttgtgctgtgtaagagataaccgagacaattttactactggaaaccccctctcttatagttggttttaggtttattacgtacagcgtgctcgagcttttcgttgggttttagagttcgttcaataccaagatgtaattactcatttgtccctacattcttttttcttgttaaaaagtcaggaggttctctgggttaatcttacttcagggctcaggctcaaacctagtcttctaagcattctagacaagattctttccttaggggatggcaaatattagttatgttttagcttttgttacctgtcgaattgtcctccactctaagataatggcttagttgctgttacatgggccacactaatcatctctaaatgacgcaaaagcaacttctgtttctttatctttcttatttcttagaacttaattatactgtagagtgaaaatagaggtgagtgaaaatgtactggccataccacaagcaaatgctggtatgagcagatgtggatgcgtgaggtgagaaacggataaaaggagcagctcagcaaacagcaattgatagttgggacacacgagatgctagggggcagtgatggccctcctgcatttcaaatacttgagtagaaatgatgaatattttgaggaggtgtgtgataggaacaagggcacattatcattggtaacggttgattgggctggtatcggagatgaccgaaatggtatataactggaaaaatgtaatcattgtgcggtatactggtattgaagtgtacccatgttttttcagttgttgagtggtataaaatttagttcattatatttcgatgtcaccagaccaaattttccccataacttctattcctgcatcctggcaatttggatgtggtttgtggtggcttatttcttttgatatatgtaggccagttgaatctgttcacatcttcaccttttgcttttcgtgttgcatctttcatgattgtgctcctcagtaaacttgaccatcaaatgcatttgcttgaattctgtatgggttgacatttgacttgtgtcatgtcttgttccatttgctttttaacccgcatttgtacgatagttaattcttatgctttcttcattgttccctttgttaaggatgccgtctgcaacaatgttgctgttcagttcaagtttgtgacttggcagttgcaaacagttctagcaagacttccacagagctgttttcaaatatcagatgaagttcaagaagaggtatagctaatcagattctctaaaatatggttccccagttagttcattttacttaacctttatggatctgtaggttgatttagtgcgagctcagcttcgaagagaaatggagaagaaaggagacattgatgtaaacattttttcaaaattccatgatatcttagctcttcatgttagtactgttggatcgcagtctgagcaatcacatggccagccagacacaccacagatggaaaacttatgcaacggtcatctggagttgcaaaatatcattatgctagtttcagaaataagtggggtgcccaagtctgacgcagagagaataacttctcagctaattgaaggacttgaaaacatgagagttacagattctaaaaaacctgtcagtgttagccaatcaagtgatgaaacaaaagcatctcctgagacacataagaagtctgacgccgtggctattcctgaagattttcgatgcccaatatctcttgagctgatgagagatcctgtcattgtttccacaggacaggtaatgtttcaaaccatcattgtttttaattttcctgcacaatataacctacgttatacagtcaaggtatattctgtcatccactgacaatgtagtcacaaattttgcagacctacgagcgtgccttcatccaaaggtggatagactgtggaaaccggacctgtcctaaaactcaactgaagctacaaaacattactctgaccccaaattatgttctgcgaagtttgatattgcagtggtgtgaggaaaaagggatcgaaccacctaccagatctaagaacgatggtgcatatcttgaggttggtggggagagagtagctattgaaacattagttcgtaatctctctagtagctcattagatgaacggaaatcggctgctgccgaaataagatctttggccaagaaaagcactgacaatcgtatacttctagcggaatctggtgcaatatccgctctagtgaaacttttgtcctccaaagacctgaaaacccaagaacatgcagttacagctcttctgaatctctccatatatgatcagaacaaggaactgatagtagttgcgggtgccattgtcccaatcatacaggtgttgaggaaggggggcatggaggcaagagaaaatgcagctgcagctattttcagcttgtcacttattgatgataacaagataactattggaagcactccaggggcaattgaagcattagttgagttgctgcagagtggcagtccaaggggtagaaaagatgcagcaacagcactgttcaacttatgcatataccaagcaaacaaggtccgtgcagttcgagcaggaatcctcgcaccactgattcagatgctgcaggattcatccagaaatggagctattgacgaagcactaacaatcttgtcagttcttgtgagccaccatgagtgtaaaattgccatagcgaaggctcatgctataccctttttgatagacttgttgaggtcaagtcaggcccgtaacaaggagaatgctgcagccatcttgcttgccctttgcaagaaggatgctgagaacctcgcttgtatagggaggttgggtgctcaaataccactaactgagctgtccaagaccggcacagacagagccaagcgcaaggcaacctctctcctggagcatctcagtaagttgcaggtgctctaattccactgtccatcgcataccattttgcgtgtgtgcgtgttctacatgtacgtatacatacgaaaagctgtaacctcatctcttatagagtgtgaatttggtgggccggtaatgggttatttcagttaccggcttaccctcaacctcaagtgtgcgttcattgattgctacataaaaaagggttggtgttacagacttgtgtattgttgctcatgggcatgaagtttctttgaagatcaaaaatgcaaaattattacggtcaccatcaaagcatctaataatgacttctttgtcttcaagatatcagcttgacatttactaaatactttcaccattccatggctggggtgctctttttggagatttggagagctatatggtgctttcatctttgtaaccttcagtccttcagagctccaatatactcatctcgacatgattaaccaggtgatctggtctaaaactatgaatagccacacggtaatgatggctttaagcttacttattttttgatttcaggatcgtcaaatctttgggggaaagcatcattacttgttaatagtatctttagtcactaattcaagaatgaatcatgatgaaatggaccgatgccgttttctgagtgacatttaattttcatcgatgttgtcacacggcaggaaatacttctcgtaattattatattttaaaacgaagagactgctccctccgccaaaaaaaaagccaacctaagtagggatggaacactacctctaagacaacaaatctagatgtccagattcgttgtcttaggtgatgtctcatccccatctagattggtttttttttacagattggtttttttttacggagtgagtatgtcagttctcacagtttacatgattacatgaggacatattttgacagcaaatacggcccctgatataccacgcaaagaaagtgatgaaaaaaaatatatagccactcccccatcctaaaatataagaatctagaatcggatgtgacatttacgatagacaactaggaaatatcccatccgatcctaagtttttatattttgggacggagggagtatttgaaatttttaatgcatttgatgtatccggaagagaagtcgatgatgaattaaacacattatgttaaaaagattccaagaaaaatctgaatcactagtggaacaaaagtacgttccaacttcgaaacaaaagacagtggacaaatagagaagcaatttgatagtggaaaatctcaggattgcttcggtaccgacacaagaaggctttttaggagcaccaaagaaggtagataattgacctgctaagctggtcttatccaagatcaccgtaccgttcttctttattgatgagaaagaaaggttcatcaatcatcatcatatgtaccaattggccactatcatatcttgtcaggtgacacatgaaactattcctctcaatactactacaacgggagtactaacgaaaatgcacagccataatcttaacgatatcgaaactaaacggctacttgaaagaagcattttacaaattttgtaaggtgacgctgacacatgaaaccaatgactggctgagttataggtggtgtttgtttttactgaagaaagagaaacaaatagcatataattaattaaattttaattattatgaacttgagaaatgaatattttaaagcaacttattatatatagaaatagaaggtttaaaaaacgtgttaaccaaacaatgtgtatgtatcttcttcgcagcgaaacaagtcgtcttgaattccctgatagcctttatcctgaagaccaacaacctgagatctaccaactagaagggcagctgaacgctaacattaacgcaacgatctaaagcaaaaacatgttacgtgacctgaggccctctttacagttcatactcaggcagtggccccccagcacgatcttctgaaaatccctggaaaaagttacaatcttgtaaccacattgcttggccattctgcctgaccagagccaatattcccctgctatagattcctccttcctccctgtttcacatgctcacttctactactacttagcacttcactttgtcaccgagcctcccataccatcgtggcattgtgagcgttgaaatgggagaaatttgtctccggtaaaaactgcaatttgcaccgagtaatagtatttgtgtgttttttccgaggtttcttgtgctaatcggtgactttttacccgtaatcacgcgggcaaaagcgcagacacacgagagagaagccaccaccacctcggcatctcctcgtcctcgagcccaatactatactactcctttgactcctccgctttaaaatttccctctcctcccccttgcacatgacaccgcagctaagctcgcagcagcagcagctcacgacaaagctctcacgaacacgcagccgcatccgcatccgcaccaccaccgagagaccacaagaagggaggaggaggaggagggggaggagagacgggagcaatggggaacagcattgggggcaagaggaagggagccaaggtgatgcagctggacgggacgtcgttccgggtgaagccgccggcggtggcggcggacgtgctgcgcgaccacccggggttccagctgctggagtcggaggaggtgaagctcctcggcgcgcgggcgcggccgctcgcgcccgacgcgccgctccgacgcgggaggctctacttcctcgtcgcgctcccgcgacgccccgccgcggggccgccgcgacgcgcctggtcggggaacctccgcgtcggcgcccgggagcgcctcgagtcgctcatgctcgcccgccgctccacctccgacctctcctccttccccgccgcccaggcatccgcctccgccccgacctccccgctccccggcagcgcctgctccggcgccgccacccccgtgcgactcaagatgcggctcccgagggcgcaggtggagaagctgatgggggagagcaaggacgcgtccgaggcggccgccaagatcatggagctctgcgccgccgcgggcgccaagagcgccagcgtgaccccggagaggccgcccgggatcttgcggagcccgcggttcgcggcgacgccggagtggggagccgggttcatggtgccaccgccggcgcccggagcggccaagacgccgcagaggtggccgacgctgcctcgcaccaaggaggtgacgaattactgcgtccttctctccatttgcactacataatttacatctactcatcaattactgtttcttcccatgtgcacactgagatttccacattttgcgaaaccaataggatttgtgattccatcaccaacttgttaggtgcaatgctctacactacagtctacgcattttaaaaatcacaaataaccgaacaaggtgacaaatttcttgctaaaccacgttagcaagttagcttgtacaagcaatgcggaattcaaactgcaaaacaaaaaataattgtacaattcttgactttggcttcactttgctcacgcattttctatagcacaaagctacaaatggccactagcataccaatcgacaaggttacatggcagcatgttagatgccgcgtcattagcagcaggaggaaacaagccgagaggcagttttcttgtcgttgcagagaaccagaagcttgtttcagtggagcactaacagtttgattctgcagaaaaagtggggagccaaaccgaggttctccgctcattgcgggaaacaaccagcacaagtgcgctagacacacagatcggtggaatgtttcctcgccttctcgtctttcacatttgagagaaatatttttctgaccgaacttgagagaaattagggtgatcatagaagtggagttttcttgcaagtttgtgctctgagatatctggaacttagttggcagcatgtggaattttcctcgttaaagatcctaaataaccttagcgattcacacgagcacaaattatttggttttgcatgtgtgatgaagttgctaaacctatagtattcattagaaaaacaatgctgtcaataatgcttgtaggaatagtgagatagtgctgactgatttacaataacattatttttccactggtcatcaaacacaattttctactctaccttttgttgatagtacatgctttattatccacagatcaagatgttctcttttttaggagatctgtatttattttcgttgttcacattttctgatcacttatttggtatccattttgatatttcagaaaaaagcaaggttcgtggcgctgccggatgagctgatagcgtgatttgtatttctgaaactgaaatgggttaacattgtactgtcacaaagcatgtttggtgactgtcaagcagaccagaagatatgaaattataaacctatcttctgtgttctgtctgagctatgctcttctgagtaaccaaaaactatagtttgaagatgagaagccgccgatgggcttccaattcatcttggtttgacatctaattagcgtgtttttggcttctctactctatgtgtgtttttttaattagcttcagtttggtggcttattattattagcccaccaccatgttgtgctttgtgcaatccaagcagtggtctggtcaactcctgttgctgctaggcagcttcagctagaggaggcgcacatgaacatctacgtatatagattatagagtactaatttgtgcatgaattagagatgcagatctgcaatttccaattcaccgcatcatctcattcgattcaatcatttacttgtgattatagaaggggggattattagtgcataattgatcagtgagttgaactgccgacgattatcgcgactgcattcctcagcacatgcaagtacatttacaaaatcatacatccttgaattatgacctttttttaaatctcaactaatctagattcggataaggatattggcatttctacaaattaatcatcagcaaccttcaaattaataatataacagtgtgcgaaagtcgccagaagaacatgcgtgtactactgggatatattcttttttccgacctcaagcattgtagattggtaggtctcttcttttattttagctaagcaacgaaaaatagctttaaggtagaaaaaggcaagggtgagaaatataaaaccacacaaatatccccaaatcaattctaaaaccaacttttaaaattcaaatttgtctgccttctagtattgttcgtaacactctgaattggttgccttctagtcttctgctttcttaagtcccaataagaaagggggcaatttcgtttctacccctattttgatgtctaatattgattttacccctaatttttagggttttcgtttttaccctcacttttttgaactgaatgtttgttttgcccctactttggatggtgaagttaacggtgttaagtaattgataaaatgacatttataccctctcatgtatgtacattaattatgttttgtccccattttatacatgtagctttagaactttatttttgggagtatatttaaaattagatgacgcacattgactaatataacaatttagacgaatttgatggaattttaacaaaatttcaacattttgattgaacttaaacaaattttttacaacattttgtaaaatgtaattatctgttcctttagatattagtcaatgtgcttcatttaattttaaatatactcacaaaaataaagttctaaagctacatgcataaaatggggacaaaaacacaattaatgaacatacatgagagggtataaatgttattttgtcaactaattaacaccgttaacttcaccatccaaagtaggagcaaaacaagctttcagtttaaaaagtgagggtaaaaacgaaaaccctaaaaagtaggggtaaaatcaatattagacattaaagtgggggcagaaacgagattgtcccaataagaaaggtactaataatagtatatctgtttatatgcagtagtagaacaaaccgggcctaaaagggacactcggcttaaattcttcaggacaagcccaaaagtaacccaaacagttgatgggcctcgcccctactccaggctcactaaagccacgttccttttccatctcgcgcaataggcctcaccgagaaacccacgcgtgtcgattcgttcgagcggcgccacggtgttcgtcgcgcagcgcatgctccacctgatcagctgatgatgtcgtgcactcgtgctagacaccgtctccgcttcgatcccccaattttggggctcgcgcgacagctgcgctgcgttcacgcccgggccgcagaaaattcaccggccttaccgtgcgcaggcgcgtcacgatcggtgttcctctgccttccccgcctcgtgtggtttcccgtccccgtcggtgcgcgaggctcgcggcgcgcggggtgggggcgtctcttcacttatataattaggcgcgcgcggcagcggcgagcgcaagcacaccccccgcgcgcgcgcgcgtttcgttcgaacgatcgatgcgccccggagcacacggcacgcacccgcgccgcgagagaagaggaaaccaagcgatgccgtcggcccgtgacactaacatggacttgatggaagtcctctcgccgccggccgccgcacgggatcatcagaagagccaggttcgtgtccagaggagcctctcaagctcttctggggtgtttcagggatctctcacgtttctctttgtggaaaaaaaaactaggcaaaaaaagggtttgcctaatgtagtaaagcagggggagtttgaaagggctctctctcacgttgggtaagcttgccacccggcccccccaggtgcacgccgccgcgcgtgcgctaccgcaccaaagcgccagcgttgtcgtggacggacgcatgccgccgccggccgccgtcgcaagcctgacgttacaagttcccggaggagctcacgatgtcacttctctggctactagtccaaggtatccgttacatggccacttcttggttggccaagaatgattcttatgttttctctctgaaacaaaaacaagaacgaatttcgtctgctactctgctagcttttgacggatgggatgcatctgatgatctgaagcaggaccatggccgtgcctggaacgactgaacagctgacgattttctactccgggtctatggtgaagttcgacaacgtcccaagggagaaggtgtgccttgctttaatccctcctctctcttcttgatctcccagtcaagctttgattatgacttggccatacaacactggggacgtggagattcgctatgcgtgcaggctgaggaggttatattcttcgctgcaaagaagtctccagacgcaggacaccagcatgttccccagcagcagcagcctgcatatccaaacaaaaagaagaggatattctgttatcaggctcctgagagagatgctgatggtttgttcatccacgagaacaaagccgatgcttgttcacagcgacagcatcggagcccagaggacgggtacgccaccatcaaggagacgaatccatgctcgcggcaaatccagatcgtgccaagaggttattttccatcctgattgtgttgataaccgtctcgaaaatgatgtaatttatgtcgtgatgtactgatgttctcctgcagcagatgtctcattgctggtgaagaatgcgtctcttgttagcttcctggagagccgcaagcagaggtaggcaaaaaacttgcaccaatttatgccatttcaatctgtttaactgttcatatttatttatttatcataaattttggttctttcatttgtttctgacttcaggttggcgagtgcagcttacactcgccgtgagaaatctcctgatgaaaaggacatttttcctacggctttcccacgaaataaaaccccactcggcaacacggaacggcatagtgctttcacgaacctgaagaatattaacggaaatcatgacgaggaggcactagataccgagttgaagatctagccgcgaagttttggattcagtttgcggcacgggaacctcttgctaatcaagcacaagttttggactcagtaggtggagtgatgaactaagtagaaacctagtggtgcatttggtagcaagagcctttttttttcttattttaattctgaatttctgatgaggttttttaagtgcagtagtgatgttcactcgcagtttcatatgaaaccgaggcatcgtcacccttttcttcttctcattgacgggagaaaaggttttcggattcgttcggattgttgcctctgattacattgatcagattgcacggtcctttttgtaactgaggatagctgaaataaaatactattttgtttaactttcctgtgtaaacaatcattttggtgcagggatacaatattgagggccactatgaaatatttcctgcggatgtaagaaatgaagagttgggaagtgggcaccttatgttgagttgtgatccaaattcatttgcacttaataaaagccagcttctaccgtagtgaagcggaggcccgtcgccgggaggcttaggccggagctaagcggaggagcccccgcggtataaatcgtcatcccttttaggttccaccatatatatatacctcttgtaaatcgccgtgcggtgttgtaacctcacccccgaaatagtgaatatattttgttggctggcgcccgttgtcttttctctcctgctttgggagggttttccacattaaatattatgggctggtttggtttgaggcctaaattaggcttaacaatatttgacaattttaatagtgtttagtacctatttggtttgaagccaaattttagcatgcctaagaaaataggtcatttcaatagtgaacttaggctattttggcttcaatccaaatataactttgccttaccaaaattagtcgtgccaaaacttaccaaaatttggcattgacaaaatttggtaaggcctatttaggccacaaaccaaagcaatcctatgtcttctgtgattgatctattattttttatcgtttgtttgcctatcgtttcctaacaccttgttgggagagagcttctcgaagctacagctacttctataatttcagctaccaaacaatttagactctcacttggatttgaagactcggtagctacaatctataaaatgaaacagtagcagcataacttttctaaattatcatcagttgtttcttaggatctccagctcctaaaacggaaccttcatatggttgcaaggattgggccgatcgctgtatttttttttttaatggaattcgatcccatcattgtaatttaaccaagttttgaggttcaatgatgatatttactcatgaaacctttttacatttctcgccaaagaaaacagcttctttccaacagttgcattatgatttaaaacctggtggttttgttggtaagtgaccaaaaaagagtacataggctagaagaacatttgtttttacttaggagagtagggattcgaacctatgttcatcctggctgactggctgtgcaatatctgcttaatgataatattttccatgatgccatctttttttttcatcaacgggtctgtcttttatttttccttccaaaaagggaacgtaatatgctactatgcaagcatttctacaattctacgatggactatgataccatgtgttacaccgttcgactatctgataacaacgagcttattcaagagcttagggtagaggacgccaaaatatttgatggttgtagcccttctgtgaacaaaggaggacactcgagacagtagcccattcgacgattggaagattcatgatggaagatgtcaaggccttcgatagctggagatcatcataccgaatatcggagtgtaatcgaagaccattggctcctgtgatcatcttttttgtctggactcatgtttacaaaagtaactaggggtgaaaacggagcggattcggacggatagtggtcataccatatcctaaaccatattttttgagcggattcggaacgggtgcggatagtgtacatatgcggatgcaaatgcgaagcggattgtttcggatgtcggaaatggtgcggaatcggttcggaaacggattaaatttatcggatgttatgtgtatatgcaatcaacacaacatcaaattagcaaccaaggaataataatacaataatcaataaatgatccatcgtaatacctccgtcccataaaaattgaatttctatctttgatcatttgtcccataaaaattgtatttctattaatgtgggacccagtaaactgattacatttccttgtaatcttctttccttccatcccatctctaactcattgtcttggcattccttttaatcaagtttatatatgaaatgtgtgcatgtactgtgttcattaaatagggttattgtagtcatttgtctatcctcctaatatgtccttaattccctagaaattcaatttttatgggacggagggagtatatgattaagtgctaaacaacatgaatacatgttgtccataatataaaaaatatagctacgtgagtgtgacatgagacgataaaagccttagatactaaaaaaatctttgttaattaatgaattagggtattggatgtaccaatttatgttatatgcaatagatagagtggttatatatgttgataatttcggattatctagcaaacggcttatcggataatccgacaaaaatgtcagataatccgcatccgccggatttaagagataccatatccgcatccgcatccacctcatactatccgcatccacatccgtatccaccggatttctaaaagcccataccatatcctcgtttcggacggattcggagcggatcggatattatccgatccgttttcaccgctaaaagtaaccactttatttgagactccatatggctatgtaactttcttttttagtttgccctaccgccccaatgagcatatgtaaacacggcattttattgaaaaatattgaaaaaaacaatccttcttggttctattaggtattggatttgactgcgctgtagaaaatacgatgttacctgctataaaactgatggtccgatgcttcaggttacttcaaaaggatttcattatgcatttccttttgttggaattgccagtttaaaaacagcacttcgctcgggagatgtatttttactcttctaagcacctggccatatatagcgattagaaatgattaaaaacaacgatacagcacgtccataataaagaataataaaatattcaaggaatttacatgaaatacaggatttgatgctcaagtatttgacaccatactgtaggacagtgacaccaacgagaaaccatagattacaaggtagtcactttttaacttttggaccataaaactggagataaacaaactgaattcatatcagcacgcatcaagtgatagacatacacaaccctactttgctgttctggagtgcttgataagccaatcaatgacaacatctatgtttacagagtccttgcaagagatcatgtagcagcaaacttcccggtcctttatcaattccaggcctctgaaatacatgagaaagaccacttcagttgaaacatcattcagtaattagccactcaaggatgacaagctcacacagaaaaggtagtaaactcacagttgatcaaccaacgcttgctttgaaacagcttctgacttgtcaattttgttgccaaggactagtaaaggaatcccagctaaagattgttttgtcagcaggtcatgcaattcacttttagctatcggaatgctatcccggtcagcagcatccaccacatatctgcaattgaatgtcagttaattattcttaacaattccaccattaggtagttaggctggatagaacacagaagcaagaaacaagcatcatgcagctagtatagtcaattggccatgcatcaatacatataactcaccaaacacagaaataaatagtaacaaggttattgtgtttgaaacgtctacctattccgaacagtcattttgttgttcttggtaggtaccaagaagtatgaaatataaggagaaactaattccatgccatcaaagatcacacgttcaattttataccaacaaaaatcttaaggtacactctaataccaccaaaatagaactccattcaatttctttttttttttttggtaaaactcaatttatttttttaccacttcaataccaccaatatagaacctttcttcatttttttttcccgattttgggtgagatgaagagatgtgtggtaccaaaatcgcaaatataaagccattgagccagtattatacatacacaggtatatcctaggctccgagctacatgcataccatttactaccactgttgtcataaaggttatgtattgtgtcttcccccaatttaatcatcctgagaattaaatacagtgcataacagatagcttaagtgtgcaggaaattacaggattgcagaaactccacggcaatagcgctcccacatggtccggaatctccgttgccctccaagatcccaaagtttaatcgtaacattcccctttgtgacttttcgcatattaaatcctacctggtttcagaatatggacaagtataagtcaggtcaattagatagcaatactacctctacaaattaagacttaagaagcagtgatatgtacatacagttggaatcatgtcttcgctgtagccacctgtctgagaagcatgccagcaacgaattaaaaccaccaggcataacattaaaatggtaagataaataaagattccgttagatgatacatacagcaacagcattaactagtgatgttttcccagcattctgcaggccaaccagggagagctccatctcctgcttgaaaaacaagctggtggaggacataattgtcatgagtaaacctttcactagacatgtttataaggaaacatgttgcatagtacttaatattggcgtatgttctaatattttactaggaagttaagttggtattatggcagcacctagtagttttcctctgtaatttgaaaggcaggagaacagttgtgaggtcaattggaggagaaaaggttgaaaggtaagaaaaataacacagatttggatgcaaatgcaataagggggaacatgtttcacttaggttaactccattagatccactaagtgcttcgtgccagccaggatctatgtctaggtctcctcctttatcatagctgccaggtgtgtccgagttcacatggggcatacgtatctatgtggcaaaattcaatgggaagctaaagtgaagcggcttaggtggattgctgaaagctaatttaccgaaaagagttcaacaaaccccttcgagagcagcagaaaagattatataggaaattagaacaaaatattaacaaaagatcccaattcaccctaaattactcaatgttactggacatggtaaaactgttgggagtcctggataacagcaaaaatacaaagttaaaaagatagactttcaacaaacctaaatttctctcagacatttgttcacgtgtaaaggaagctaggtcagggtaaggatgcaaaagaattacagagtttcctggaagaaccatccttaaagagagtagaagatttggttccacgggctatactaatgtaatcccaagcttcatagatactaaccacattcaaatctaccgacctaacaacgatccgattttgacaagctttaccaatcctggatctaaccgcacatgccacacaaaccactccactccacagccccgccccatcatcccgccgccgcacaggggagcccgatccaaaccaatccctaccaaaccctacctcccgctcaacccgaaacacatggacgatctcgtccccacagaagggactgaactgagatgcacgaagcggaaaaaagaagaagggagagagcgaggcggggggagaccttcggagccagttgaggagcgagtcccagagccccatgccgttcgccgccgtcggggtggtggtggtggtgaccgtcgccgccagccgcgcccggatctctctcgtcgagggaatccgcgatttggggggaagaggagggagagagaagaggaggacgggtcgaagaaggaaggaattgagaatgatatggaggacgacgagacgaaggctgtgttcggcacagcactttcagtgggcgctacagtgttttgccccgcgcacgcttttcaaactactacacggtgtactttttttcaaaaagtttctatacaaaagttgcttaaaaaaatcaaattaatccatttttgaaaaaaaatttaactaatacttaattaatcatgtgttaatgaaccgttccgttttccgtgttactgtagcgcggtgggaaaacgtccaaacgaacgcagccgaagacgataggccgagccgatgctgagctgcgcgacgcgacgcagccgcaggtgggcagagggggagacaagacaacggcacgacggcacggcacgagtcgcccccgcgtcacgggcgaaacggatcgcgtccgcgactcctccgagtaatccaaaactagccgagctctctcgagtgggccgcgagattctggcccagtctatgccgccttggcaacgcggcccgatctctctcgagtgcgtttctgggccgaatcggtttacaaatccgtttgccgttttaactgcttgcgacgagattattgtacggggcaaagtttcaaatcccggtttttgaactcaaatctcgcgtactcatcgatcaaccgctatgaaaccttcccgtttcaactttcaagtcgagtattaattatcttccggcatggctttctccttgcatgcatatctggatcggttggttgatggccaccttttcctccactatcatttcttcttcccgtcgatcgatcatatcgatcgagagcctgcagcctttctacagtgttttgtgatcttgtcgctgccggagcccgggcctactcgccggctcgccgcgcgccgttgtgccaccgagcgcgcgcgtgaccgcgatgcgcacgaaggataaaaaggctcggtgtaattgtgtgcgctccaaaaaaaggagaaaaaaagaaggcgcagggccatgcacgcaccacatgatgacgcctcgacggctcgacgcccttaacttgcaaggcgatctatggtggattggtggatcgcgcgatggcggtcgatctcgatcatatatattctcgtgtcaacgtcgtcgtcaccgcggccgcaagacgtactccacgcggccgcgcgcgagcgacagaccgacggctctcccgcttttgatgttgataattcgggtaccaaactcgatcacttttgcagagtcgcttatgtattggcccgtcacgtccgtcgacaacagtagctatagccaggaaatagtaacttatatggcttccttattgatcacggttagctagctaggcctgatcaggccttcaactgacgtggattatattcatctcgacgaaaactactcaacaacaacaagcacataaacatgttcgtctgtagtgtagactgtagtactatagtctatactgttcatcttttacccgtaactagtactgtagactgtagtgcgtgttgtacagagaaaattctgcaaattggtaaggatttggtgtgtgtgcggattagcatgcgtgtgcatggcgaattaaggcgcggcggccggccgtgccaccgccccacggaagacggcggctgctttggttgggggcaggcagggatggccggccgcgggcagccaaccgcaacagcgcacgcttccactaaaaaacctgtagtagtattctatcttcactcaaagcccccccaaagcttctttattccctcgcactgaccacgactgtttgttcatcagacgacctgagagagagagagagagagagagagagagagagagagagagagagagcaacggtagtagagtaaaaagcttattacgtgggggcagtggcacgatcgatcgatctaggatagatccgggttacggtttgtggcatcattgcagcatttgacacatgccacctgcagccgcgctctaatttgcttcgctctgaaaaagttagtgtcgccgcccgcccgcccgccagccgtggcgagccacctgggcctttgccggccgctcgtcgatcgccggccggccccgtactgctggctctcgcgcgctcgctcgctgctgctgcgtgcaatgcatgaatatgaggtgaattttgagggcatcatgatttgtcggcatcgattgttcatgatttggcaccgtgcctgcgactgcggattggtgatcatactaggactttgcactgatttccttttctttttttttgcgggtagcagcgagcgcttgagacgtgaatgatcagtcgatgcgatgcgatgcagtgatgcgtcctactattactctctttacacttttacaggcatgcatgctgcgcctcaagaggcggtccggaccgcatgctatgatgtatgcagctatgtacatacgtgcctgttcagaagtcagaagggtcgcgtttgagacgtcagggccttattttcagtactactcctagctacgatcagaagaaaatttaaacatacgtttacaatgtactaattaatacattatcgtgttatctactcataatctcatatgcgttgtaatgtactaatacattatcatcaggtaccctttcgattgattggcctattgcaagtttggaaccacgaaagggtaaggtgacgcaagcgctacgccatggtgaggtcacgcggaggagggggcgcatgcaggcgcgcagctgccgccatcggcatgcagtgacatcgtggtgcaaactgcaggggacgtcaggtcgatgggacactgcacgcacgtagctctcgcgggtcgccgcccggcggatcggctgcggggcacatcgaccgatcacacgtcgggcaggggcgtatgcgtatgtatgtgcggcggccacccaaaaatgtcaacctgggccgcgcggcgccggcgaccgggcacctaccggccgccgggccgagcaccgagtggcagtcgacaccacgccgacgacgcatcacgcatgtacgtgcgtaggcggtagtgcgatacaagctagcttcgttttcatactttcatggctgacaagtgtgtctggcactgtataatgtgcctggtatcctcaaggggccttgatcagttgatcgttcggagtgtcaaatcacacgctagctttgagtgttgttgcttagttttattctcgtctaaacctcgccaaataaagaaagcgttttcaggaggatgcttttgtgtagtgtagcctttctatcccttgattggtccacgcacggtttagaaattttagatcatggtatgttctgaatactactccactaaagtgctactttatccagactggagataaatctggtgagcttggctccaggctctctgctgtgtgtcatcatttgaacaaatccatgtattcaaccaagctccttttaaaagaactttctcaagagcaaaaaagaaaaaaaatggactaagattttgatgtttgctcataagggatggattccccgaaatgaagtgaactgcaactgcttgaacactttctacattttttatcacaaaacacaccaaaccatttcttctcttcttcattgtcaacaaatatgcatgcttgtcatggacgaattcaatataggaaaacaaagaagagtgaaagaagaagatatgaatctcaacttcacggccaatctaattctactcacggacgtaaactctcctgtcaggatcaggatcacatccacacatcttgatcaaagccaacgtcagagcattggtcgaacaacatatcgacgccaatggcgctgcagccgccatcgtcgccgcaggcagacaataagccagcccagtcaatgtcaagaatggcatccacctcgaagaggccgggccagtccacgtccgcgccgggtgtcgcggcggaggccgaggcggacgaggagcatgacgacgacacggcggaggcggatgaagcagcgcaagcgacgccctgtggctgggcgctcgtcggcgtctcctcctcctcctcctccttgtcgtcggcaccggtgccgccggagacggacggttcatgctgctgctgctgctgcttcaggggatcaggctgagcgagtgacatcaccggccggtgagtgacgggatcaaggcccatcttcttgagcttcttcttgatgtgggtgttccagtggttcttgatctcgttgtccgtcctcccggggagccgtgccgcaatcttggaccatctgtacgcacgcacgcgacgcacaaaaacaccatgagattttggatcgagtggcggcatgcatgcggcagcatctgattttggaggcattgtcacctgttgccgagctgctcgtggaggtcaatgaccagcttctcctcctcttcggaaaggaggcccctcttgaggtcgggccgcaggtagttcgtccacctcagccggcagctcttcccacacctgagcagccctgcgagtgaaacatagcaaaaacccgaaggcacagtcactcccattgcagttgcaggacgatctgcatgttaacgcgaatccttttccctttcgcgcatcagatggaaacacatggtcatgcatgctcatgcacctgcgagcttggggacgagcctccagcagcagtggccattggagaggaggaaggtgaccagcttctggtcctcgtcggccgtccatggccccttcttcaggccaaccttctcgcagcacggctgcctgcccatcacacgctgatccctgatttgcgaggctatctgtatctcacgagagggatgaactgagcctgatgagctcacccgagtcttaatttggagaggttccggcgctgctcggggattaatagatgcggccagaagtggaaaggccgaggcgagtcgtaggcgtgacggcgtcaggccgtcactgacatcggctgcgagcctcctggccctccaggcctccaaaatgctgttacgcgtacacgtgtaatctggactgagctctcgacgggggcgttgtctgcgtagtgtcagtaccactgcagtctgcagaggatccacgtccttgagcagttgtgtcacagctcgctcaccctgtgcacagcagcacaggacaacttctacgagtacaatacaaagcatttttgcattctctagtgatatccattattcaccaacggaaacggagtatactccaacggaaataaatatagagaaatcacatatatatatatatataaatttttacttgtagcaaaatttttaattcattaaatttagtagtaaaagtattacttatagtgacgtggacaaattatagacgttcaacttttacaaatctcatacgtccattttttttatcctataatagtttctatgtttatatgcagtttctaccgtatattttcgccaacaactatgcaacacatccaccaccttgttatgtttgataagataagcttgtgttgaccctataatggtatataaccatgaaccttcggcgtttacaaagccaacctcgatgtagtactgtctacagtagtctgcagtgcaagaatgcggaggtagtaacctgaacgaacgatattttgagcatcccctttcgaagatgtgcattcaagtaacatgatagccacagctcacggtgatagtacattgttcacagctgcccacttatgggaatggtcgttatctgaaatgtgagtggtccgttctctccgtaacaaatttgcaagaattcaatcttctgataagaaccgtacatggatggcgaggcctgactctgaccatcaaccaactgcttgtctaatagcatcactccactgattgccgcgcattcctgcggtcgtgcaaataaatacagctctgacgagctgcaacctgaatggagtaacgaataatcgtatgcctggcctgatagaatttggtgtttatgttataaattctgaatcaagtattttacattcatgtacaacaacgctagctacaaagtgaaaacatggatcgggagaataatgtctctctctaaccactagggcaatctcaatctacatcccggcctaatgaagctattagttacaactactgtaaatcatcaacctttatccctccagcaagatctaggggatgaggtctggtctattttacaacattcatgaacttgtaattttcatttaacaggctaattttcattcatgaatttgtgatggccataaggagcaagcaaattttcatttaacaagcagcggcaattagaatctcgccttctagaaacacattcgaacaacctcccatctttccgactgaaatatgtcagttctcctccatggccttgtaatactaagatgggttttgaactaacttggggtgagtagctgcgtaaactgaagagtttggatcagtcttcaggtgggatagaagatgttgcacatctggcctcagaatttccattactttcccacataacgtcaatatctctagtttgggcttgctagtgctctgaacgggacctccttgaccctcatacatgactgcatggtgcctattttagcaacaaagaaaaaaaataactgttataagactatatatagagaacgatgcagtgagaatataatgcagaatgagttatgcagtaacaattagtgtagaaggagaactgaaacaaactgcatgccagggaagatgacaagtgcggaaaagatgaagtgcgccttacaagaagtcaattatgtcagcaatttccgatgcctccacaggaggtgaagcctgagaattcttcccaaatacatcccccaacacattgaacagcaaagccaaggtctgtagatcccagcagcatatactaaattagtagagaacggaagacagtagtttcttcatatagaattactgtggtgtgtaggtcaagatgaacaaatctcgtaataggatgtacatggaccatagagtaataaagcaaaagtgaactgcagttcgttttttagcttaattgcataaaaggacaacacaaagcaatacagaaaactacataatgttttttttctgtgttcgattagtaggttatgccaccaaaagatgtaattaaataaaattttgaagatgttaagagacaaagcacgatcctgtaatagctactgattgcaagtaaacatatattgatccagttcaaagcgccaatatcatacgaagttgtccccagcagttaactcaaaatcaattccaatttattaatgcaaaaatctaaccatcaggaagtggtaagcaaaccaagaataccttcatgaacagaggtcgagcaaaggctagacgaggcaacaagggacccaatatgcggaaagcaattcttaacatggcaactgagttgactggccgaagatgcttgatgacggtatgggtagattcaagccattcatgtggaagattgctgaaaaacgagtgaagaagggcaacgatgttacctgcaagcaaggtggaacatacacataaggggaactgtgatacataagctaaagtttagctatataagcaaaatatcgaacatgtgaagaacacagcaaagctttgttcttatacctatggctgtagatgtattgtcttgagaagcccaagtaggatccaacagtgcatacccaacagcagaatcaagctctttaacaggccttgaactatcagcaagccaccaacaatcttttatgatccgggctgcttctgcatatagaagtgtgtggaattctggtgggagttgtgccagcaacagaccacaagcttgaatcatcagaacagacaattgttggcaggaatagccacttctagaaacaaagttagatgcattgattccacttgctgtggtgtttggtcggttggcaccaacaggttcaactcccccacctgaagaagtcggcaccccagagttttggcccaaaccacctgacattccatgaccactatttgactgtatgagcattgcttgtacatgtgctattatttgaactagagaggatactatttgagaagctggcacacaaagtgagagaatttcaatggctgctgtttccaaaacaagctgtgtatatgatccaggatcctgattttgataaaatgccctctgaccatcagagttactgattcctccagcggaagatgtataaggcttgttataagttgtgcgtgctgtactgccagcagcatccgatgggtttgatttggacttgcaactcaaaggaggtatgacattattaacaaggccaaacaaaaggttggcgaagtattccggtggtggacaaatagatgaatttgatgacgctagatactgggcaaatgattctgagaaaggtgtctataaattgcacacattagtaaagaattaaccaagatgggcaggaggaagcaccataataactcaaagagtatatagggtctaccttagtgctaacacccagcacgttgaggatcctaacaattaacttggatggaagatgaccatagaaatatgcaagaatatcacgcacaaatgtaaaccttagaggatggaaggccagaaaggtagaataaactgcaaggactctatctgcgatatctgtggcatcgttctcaataagcctataaattatcaacgggatgactagaagcagacgagcagcaatgtcatcaaaaaagggggggtaactgcattgaaaagacaaattagcataatgacacaaattggctaaagtaaggcagcaagctaagttttcatgacttccattgaaaccaaattggcacaatgacagatgtgtaatggttgaaaaaaacaaatatctccaaatccacaaagcctggcatcctaatggcttgtacggacatagaacacaagaaattatcagaagataatatatcagttagaggcttgaattgaggttactacttgctccattcatttttagaaggcacgatttgacttggtccaatcttctgactaaatttgaccatgaacctctcagcgttatgttgctattaacaataaaatgatggccggatgtgttaagtagtatatgtgcttgttgtattgttgattaatcccatagtgtagggtgtcttctgtaaatgctaccctcttgtatgtctggctccttggggcatattccagtacaagcttgagttcactaagaatatgtataattgcaactaattactagctaaataccgatgcttttctacgggtaaatatgaattatatgtgttttagcattgtttggaacaattatatgtgttttaggttttagaacaattcatccctatagatgcctttacatgataaacttgtattttagagatgaaataagattaaaccaatatgttggattattttgtaattttaaagcacatagaatagtatagatatagatagagttggtggagctggcagattcactgcctacattgcctcctagaatagtatagataaagatatgtgaagttctgaagtcaaaacttcagaagtgcatgtgcaccttgtaaaagtgatcggagtgagtactatagatttttcaaacaaaagaatagacataaaagaaaagcaaatatgtaatgatatttttcagattgaaaaaaaggctaactgcaattgctattcggcgggcaaataagatcgagaatgcatagagtcttcatgattgacatatgcagtaattggcataatttttatcaatgtgctaaaagaacatttaaacaaatttggaagaattagaagattgaaattaccgttctttccctgagagatggttaccgagggctttctgaagttctactctttttggaggctgattttttagccaatgctctggagaacgcgaagtgcagaatgctttaattctttgctgaagttccggtctttcaaggagatttatctgtgatgttacatttataaattaaagaatgcccaaatctgtcaattaatagctgaagcaaccagtaatatattaaattttgaagtaatatgcatataattaccaaaatacaagtaacaacatatatgcagctatcgtagaaaactagtagtccaatacaaggcattgtttagatgaaatacaaggtatattagtaaaatcacagttgtaccgctctttgtcatggttctattagcatgcatataacatttccattagcttcactctttatcatggttcacaatagtgcagatataatcatatcaagtagtttcataactagcaagaaagatctaactagtggcttgcaaattgtaatacatggccaagaagagctgttgaacatttgcagacagcatctaacagttgggaatagttagcaaaaaagtaaagaatcgttatggagatttacatgacttcaaatatatggcatgtaaccctgaaaacttttaggacttaccacaaggcgtaaagcataaggatcatcatctctatcaataagagctaacagaagaatgtccaatggaagtaactcatgtgtccagataaagaaagcaagattcgtaattgctttagagagtaagtcctgcattatcagaaaaagaatgcatattggctactgaataagtgtagcccacataaacaaacagccaacaagagtgtttttagcacaccgaataagaaaagaaaaaaaaaggcagaacacctgaatttgatgccctctttgcagctcaagttggatatgatgcagaagaacatcaaccattgtataaatatttgctgtaacttcttcgggtgaaaactctctcaaaacacgggcctgcagtaagattaaaaagacatatatacatagagagaatcttttatgtcaatataattgctaattagaaatcatacaagatttgcactgttgatctctagatgtccgttcatcagcatccaagcaccagcacaaagatattgacgatgctgagggaaactgtgacttaaatatgtcataacataggttggctcagcagatggtgagagtagctgattacattgattaataacagttgtctcagcctgcaatggaagataaatcatcaagcataaaaggtaaggaatattttgccctagaaaagcatttcatttaataagcatgttatagcaactaaaggacaccagaaatagtactggcttggaaattcaagacttttcgagatcttacaattttctaaaactagtcttgctatactgctaatctaagcctatttcaaaacaagactgcaatttttatcttagccagctaataccattctagaggtgaaagaattcattgccgtttgtaatagtaatagtacataaaaaagtgtaaaatccatcagtacattctccatcaatagactgcttataaaagagtgattacatggttttaaaaaaatcaactaacagcagcatgatttggcaacaactgatacaaaagaactataaactccctaaattgttattcgacgaatgtatatgaactccatataatagtcaaaaggagcatataaatggccaagacaccaagtactcaatccaaaagataagataatagtacctgctgccatgcttggatagcttggcctctcttatccatcctccccattaaaaaatctcgaataaggggaggaaaatatcttagagtcttctctgaccatgtatgctggctcgttgccataatttgctctaataatggttgaagatgaattatatgttcgacctcagcaattccacgtgtcttcatggtgatagcaaggcttattatcgttatgcggttaagtgtttcagtaaactcagttggaccctacatttacataaataaagaagttcactttatgcgaatttagtaacaggtgaaatttccagatgaagcaggttaccttcaattcttttttcaccaaaaagaagtctcttagtgagagaatcaaattcatgcacaaattttctgctaatctaaaaagacgatgctctccacgtttgactttaatcattgatattatctttgtaacatcatacatcaatgccttgcttttcccatgatacctgagcagaagaaattcacatagatgtaaaccaaaaggtgcaccataatataaacaataaatggaacaaaacactaagattttttctaaatgatcatcaaaccttttttgctgaggtcagacattccaattgtggatatgcatgataagaaaaggctttcaaggcaaatagcagaaaacaaatattaaattacttaaattacctgtatagaggaagtagcctgtaattcagtatctcaagtaggagcagagacacaccagatttgctcaggatagatggagatctttgtgttaatgtctgcaaggtttaataaaaccataggaagacatcagagtttaaaaaggaatatgaattgcatgttattgaggaaactgaattatgcttacaattgcagaaagttaatttagaaatcagagcaaatgaataatcaactgttaatcacaaggtagcataaagccataaacttcacatgaatactacagattacaacaggaggcaagacttaccgtaaaatgcgggcggaacaatgaatgaggggttataagcagcagtctaacataggtttccactatagcaatgctaggaacattctaccaaagaacagaagaattatgtaagaaaattagtgtatggtaaagagagatggacattagtacgtcaacagaagaacatatagttgtgattatatgggcacttctagcaaagtcattccgaagatcaaaaatgatgagctggtcatataccattaacatataaagttataaatcattcatatattacagctaagttcattaacatgagctattatgccaggagatcttaatagataaaagataaacatatgaattgcttgtcattttatttttactcaggatagattgtaacatattgattctgatgtttttcagtaataattaaaggcacatgagcactggtctccaaaccataaagagcagagttaaaaaaataataataaagataagcagcaacagtgtttttacctggccaagaaatatggtctcttcaagctggaaagcaagtttcaaacatagattgatagacaacccagaaagcaatgacatagacagtggataagtttcacgcatcattgtcattctttcatttggctgcaaattgggtccctgaattaaatctgctactcctactgatgtaaaccagttcatgactgcttcacatgctggttgtgccatggtgaaggagagaacccaaaacatgcccatcgcccgctcatccaagctcgtaaaatctatcatcctctccccagaagctattattgcaagggaaacagtaacaaagctttattacagatacatgaatggggacaaaattgaaaataacagtaatggtttacagccaaatatctctcttttcaagaaaatgtatccacctcctgaattatgagttgtggtgttactatgtagaattttctacacttaatcagtccatattgcctacccagaatctaccggagaatttcttttccatgaattctagatctaccaggcaatattttatatcaaaagcatagtgatactttcatattccatgaataaggacaagtaccaagtaccttttgtcatttgtctccaccactcatctatctgtttgcctttctgaagctgatcactgttcaaatgctctctaattgaagtgttgaaagaccaaatccgcaaagtttggctgctacttatgaaatcaagaagaatactttgaggactgatattatttggatcaaggctcttgtcttctttgtggaacgaaattatcttccttgtagtttcaacctggtaacagaagaaataccagaatggtatatagagttatagacggtaaattaagacaaccacaagacatcatgaaaggaaacattagaagtattaccaaaagtttgtatgtatttaaagttttatagcaattggatgtgagattagtttagctgagtttgtcgatcgctgttattacttgttagtccttgcagttcccaaaagatgagcacgaaacaaaataaagcactctgaatattttcatgaggaaatctttttttggtaccaaaatcatgtcatcaactaatcaattgaatatgattcaccaaaagaaagaggtgtttgcagatgatcttagaaagagacatcaccttccttgggtccgaactaagggtgttcatcacaatctcaatgcggataatctgtgcgagtaaccaagtgacatgattactgcgaagaatctgttgatcactatttgttactcgagatgcaagcttgtccacgaaatcaagaaaatcaatacagccacttttcatcagaaagaaaaaaatgtcagcaaataaaagccaatcttgccagcactgagtctctgcaacagcataaaaaagaaagaatgaatataggcaacagacagttaccaaagacttgcacatatctgacaataatggtaagcaaatttaatttcttgaggtaaaagtttcacgttctaaaagaaaaaatagtgaaaagggtgcatcaatagaacatttgaaatttatattcccatcagctgtccacttgaaaaaggaactttattatattgacaaggtaaatggttaactttcaaattctaacctgagttcgtgagcctcagtagttcaattgtcctgtcagcaactgcctcaccgatcatatcaggtgagaaaacagctcctggcgttgatgattgttgaggatgttgtctataacaaggagcaacaagaagaacacgcctccaccagtctggtgacggagttgtgcggagtgcatgcctcaagcaacgcaaagcacgttcccagtctaaaccccctttaggaatggagtttgcaagatcctaaacaacaaagttatatcagatttcagatcctacccaaaccaacattagtaactaatagctcaattatctattcatttcctgccaattttcctgatccatccttgaaaaacatgcggtgtgttgaaatttaattgcaaaatatattttgcctctgcatgttatgatgctttgcgatttttccgtttatttctccctcctgtgaaattattcatgatcactcaaacaaaatgtgttagcatgtcatcccctgttaatgttagaggatactacaacaatcctaaagagtttgcaaggatattccagccattttgcgacactaatttcaatctcgtaggctcgtagccccaatgtggtcaaagaatactgcaatatctctatgcagtcaaaatatgtgcagagcatatcggatgaacataaaaattgagcttcagtccacaagtacaaagtcaatgcatacaggttcaatggcaaacttaaaaggggagaggtgggtaaagagggggaaaagtaatatcacctctccgtgtagcggctctcccaatacacttggataagtaatgggagaataacgcaaattagcaacagattcaccagctatgcttgggtatgattgcgacaagaaccgatgagttgcaaatgttgggcaatgaaggtgttgatccaacatctgcatgtgcatacataccatgtccctcctcctatggatctccataataatactaactagtgcttcatcgtcaggaatattttcgagaaactgcaagttgctgcgaacaagctcgtagaatggaacacgacatttatcttcattaactagaatccatatcacatctaagcataggtgcatccattcatgcaaaggtctttcaagcctcaaggtttgcaattgcaatgcatcagcttggtccacaccatgcggtcgctggtcccaattaacaagccaatttaccatatgctggaatatcacagcatgggtggctggcttcaaatcagactccagccctgctagaataattctacaggataagtgatgcagataactaatttctgctcccctgcgagactggtcacctctagctgtcagaccaagctgtccagggctagagaattctgctcccttaatgggtgagacatttgcacctatgggttggtcgataccagattgagtgggagatcctatagtgttcattgctgacaatggagatgtgggatttgaagggtgaaagcttggggcatttggcactgcaatagctgatgaagaagatgttgccgggccaccagtagtcacagaaaccccttgccccattggtacctccacggaggaaactacattaagtagagaaggaaggagactgtcccatcgaaggtggcctcgagcacacaggcaacgtgtggcaaagagcaagaactcagattgtggggcgtggctactacactgcaggacaaatgagatgagaactgattccgtaactgcctgcagctgctcttggtcctgaagaaacatgcaaatcaaataataaatttgttctgttctcatgacataaacaaaagtacttgcgtaatgattctgcttactgggaactgcatgtgcaactgctcaaaatccgaaatgaattgctcatctcggggaggcagatctctgttcatagcagttactctcttctgcaacttgttcctgaggaaattcaatgcccattatgcattacagttttagaaaagcttgctgaattgacttccatcgtcaaactaccatatcaaattttgtccaaaaactaccatatatcaaaatgaacaaggcacgaaaaaccgctagagtacagcacactagttccaaaattgcggcaataatctccggatattccagaattcctttcaaaaaaaaaatctccggacattgcagaagccatcgccttcaaaggtaaagttgaacaaagcgcgaacgacaaggacaaaataatccgacctaacctatcataatgtttcatgtgctcgagccctcgagcaatccagctagccctaaaaagtaatccccaattagaagtccaacaagtgggaaatcaaacttacgaggtctccctagttggatcctcgacccgctgcttcgagttcatctgcaaatcacagaaacccagggtctgagctagcgttcacaagtgcaccacggttagagattggggaggagagacaaggcacgcacgccgaggtatagggtgaagagatcggcgatggacgaccgcgccgggtggtggtggtggtggtggagctgcatctgccgctgctgcgggagcaccgccgaagcagagatcgccggagacatcggctgcctctgcccgtgcgccccgtccatcgccgatgcgccgcttccgtcgccggcgactggagtggtgcggtgggcttgctccgaccgagggtttaggagtgtggcggacctgacctgatgagctcttgcagtttgggggaaagggaacagatcaacggacggtgggatgtgtagtctcagctgcatggagacggatccagaccgctggtatgcattctacctttctcttgggtcgaaaaattgaaattgaaacagaacaaaaacatgttctctggtatatttgtggttcaaattagtggccatataatcgaaagctaccaaataccatccggttatatactcctttcatttcttttttctttaacgtaggtggaataggtagtatcatgcttggtctcattattttacgtacagctaattataagtcgtgatgattttatattaaaactttaatatatttgtccttactagaaaaaatacacgtacattgcaacaagtaaatgttattttaattttattattgttacacaatttagctaaggtaaaattcaatgtgggaattcactttgatatttattgtttaaaaaaaatcatgagctgcaattaggagtctgtatttcatctcaagttagcatgcgagttttttcaaaagattttttatacgattccttctatacttccaaaaggaaacaaggttaaaatccaactcaaatacggatatgtatttccaaaaacgaacgaacttaaaaaccgactcaaatacggatgacgtaccaaaataccggcaaaaacatctttaatttttataataatagagatagagaagagattgaataaaaaccaatgctgaaaataaatcacgataaaaaaaactactatgaaattaaatttaaaattttaatttttggctttgagtgataaaacgaaaagcatcgatgctaggactcttacaaatattggagtatattgaactcaaggatgatcctacatatcacacatctgatatgtcccattgggatggtcccaaaaacataatttgaacgaattttgtgaattcgaccagctactagtacccagcaccggcgcttccaagaacaatccgcgcgaacgagcacgtacggcgctacaaaagtacacatcacaattgacacactacagtacgtcgtgatcggtgaactaaggcgcccgagacggcgacggcgccggcgacgcggcgagaggggtggtggcggcgcccccgctcccggcgctcggcatggcgtcccagaggaggtcggcgatgacccggttggcggcgtcggaggtgtggtacgcgtcccagaagacgaacgccttgcggtcgctgcagggccgcgagttcggcaggcacaggccccccaccgtcgtgtccacgttgcagcacgacgtgtgcgccgtcgtgaaccctgcacacacacacacgcacacacgcatcgccaacggtgagacacgcccgccgacacgcgccggaagtttgcgttgattgattgattgattgattaattaccgtgtttttcggggtggacgatgagctccatgacgacggagtagcagtcggcgagcgccatccgcgcgccgggcagcttggcgttcatgccgtcgagcagcttcttggcggccgcgttgaactccacggcgtagccgttcacgtggtccaggcacttgccgttgccggagtggacgcgctgcgacgggatgcagcccagcggcggcagcgagttgaacaccaccttcctcgcgccgagcccgtacagcctctgcaaaaacgaacaattcaaccaccgccatggacgatatatcaggccacctctttaaaattggctaatgggggggtcactgtcacggcgagattggtgggtgttctgcctttagttgccggtccagagtggtgatgaggaggcggatgaacgtgtcgtgcgtgtacgtctggccgtccgccatgaacggctgcaagaagttgttgatgtagtcgttgctcccttcagaaacagcagtgtatttcacgtcatttaacggctaaaaatccagctaactatctgatcaaatgcggtcaaaactcaaaaggccgatcgattcacgagaggaaaatattgtaccaagtccaatttggaacagcgccgcattgacggcaacctcggcggcctccttgccgatcttggcgatcatcgccttcttgaccatctcgaagcacgatatctgctggtcgaatgagaagtactgaacctgcaaatcggcacgccacgttcaacaaacagtgccaacaaaagtaacaaatcgtaaagcataacgatgatgcgatatatgcgacttacaaagtagacgcccgtctcgttcagaatgccggcgccgccggacgcgaagttgacgccgccgaggacgtcgtcgtagaccattgacagcgacaggaacggcggcggggacgggacgccgaacttgtcagctgcatcaaccgaaatactgaatcaggtcgaatgcgcgtgtggatcatcagctagttatctagcaagttgaattggttttgcatttacccatgtagtctccgatggttcttccattggtgaacctcccggtggcgacgccgttggggtagtcgatgccgtaccaggggtagttggacttggcgagggagagcgggaagtagttgttgttccccacgtccgacatcgagtcgccgaacacgtatgtcaccgggcctttggccggtggcggcgccgcggcggcggcggctgattgggcgagcacggcaatggccacgacggcggcgagagcttgagctgccattgttgcttcggcttatcagtatctgcgcctctgtgaatgtgttgtgcacttgtgctgatgctgtgcttgtgttgcatgacgaggtggcacgcacggatttttatagcgcgcggatgtacgcggtggcgtggttaagtcgtgccattctctacaagtttgggttaatctaagcgcaccgtttcaagtttcccagcttgtcagcttgagtgcagtgatgaaccgtgcaacatatatctattcgtgtggccatctgaagaacgaattcagagaggaattggcatgtgtggtagctgaggtggttgaagaacttggctctctttgctctatagagcagctttgacggtttaaatcggtagtgggaagggtatcagcgacctttgcaatcaaatagaccatatgactgaacaagaggtttccctttttctctgaataaatttccccaaactatagaatttttaagagttctcattttttaattaaactattacagaacactatatattcaaaatgaaacttaccgatttaatatcaaacttaatactacaaactatataattaagctggagtgtcgcaaaattacaaatttagtaatcaaatcaacacataactatatgtctaggtgtcagtttaataacaaattttagatgtttataactctaacataacattagtgatggtgaattaaattctaaaacatatagtttgtgataacattattattaaatctatagttttgcaaaccttaaacatttatggtaaatttggtattaaagctgtacttaataatttgatcgaagtaatagatttcaaatttaggcactgttcttttctccaacaaaagttgaattaaattttggatactcgtggcacgcttttcaaactgctaaacggtgtgtttcgtgcgaaaactttctatatgaaaattattctaaattataagattaatctattttttaagtttgtaataattaaaactcaattaatctcacgttattatcatctcgttttgtgtgaaacacttcatcttcatcttcaggagattgcgtgaaactcctttactagtagaagctagcatctcatacccagcgtgagcctgacctgggctggggcaatgcctggttttctttgggctaataatccagtacgcagcagcccattacggcccctataactcccatacacggccagacagatcggccttggactattttgggccattatttcccagttctaacagatgagatggaccgaaaatttccgacacacgaaggccgataaaaaatctggaaagcaagagagccccccgtcgcgtgcgaggatagggagagaggtgaaagagacacggaggagagggaaaccaaggcggcgaggcctccgcctcactccggtggcgacacggcgggctcgccgccatgacaggagctctggcgatgatgccatccacgtcctccccctaccctctcctcgctccgccgacctgctcctcccgcctcccgcctctccgctgcttcgtcggcctccggtggtccgctccccgcatccaggtaggcccgtttccccgttccccttcttccgagaggagcaactgctgtctgaccacagtagttatacagctgggtaatcgtgaggctagcctaggtggcgttaccgttcggctctgttgtttgattctagtggctgcttggtacaggtcagggagtatccggatgcggttgcagggattgccaagggtgcgggtggacgcggtggtcgattcaggttggttcacctatctgctccatgaactatggcaacgtttgaaaacgttcagttgttagattgctgctactcggacgaattcatagtaactgtgtcgtggtagtgggcaatggaagatggttggacaatatgtattggttcccattgctctccacaaactaacaccagcgagatatgtacctgttgttttagaagtgtcacttgatgtggtaaaagaagcgtgaaagttaagacatctgtcaggtgacagaatgggctgtttgcgctttgtcacagcgatatcctgaacatctggaaatataaactgccatgcttgtcaaagaatgcaaatatgcttggtttgctagcccatgtcagaaatcaatcactttgtccaactccctttttgtcaacaatctctgttgttaattcatctggtcacaagcagaccacaatttttttttctacttaggactatctctagtgaattttgttgagttgacattccattttgtaaaaatgtaactttttaagtaatagctgtgatcttgatgcggggtgatatttcattctagggtttagtagagttggtttagtggaaattgaatgtgttatagatactacctctaggatcttatgtcctgattatttccatttaatgtcttttttccttatatttttcagagcacctgcttcaagtatctcccaaccttgctctagaaccatcatcatcacaaatgaacatgttcaaaatgctgattttccacctaattactcgaaaagagagaagaaaccatttccaataccagtattggagttaagacgccgagcaaaagagagggcaaagaaagctgaagggaaacccaaacgatctttaccacctccaaaaaatgggatgctgatcaaaagactgataccagttgcatacaaggtgtataatgcaagaattttgctgatcaacaacttgaagaggcttatgaaagtaattccagtgaaaggatgcaagtaattctcctgttccatcccatcctgatcattatatacacagatcttgtttgtgttaattccacatgcattggacaacagaattgtacttccatcttgacataaaccacacaacacattgggatgcatacaacgcatagaacaataaggaagtagaaattattctataaaacaagatgtaagaaacttcattatatatcaatttgctgacttgtatttgtatatggcataaattatgaagatattcagctgcttaatcgatgtattgtgccaattctctaatgaggctttctattagacatagatcattcaagcatcaagtccaaaatgaactgcatggcatctgtggtgactcctctattattcatagttgtattttatctgattattgattgaagctatgaaacagtatctgttccaagaactcattaattgttcgcattgagtacatgcatttctataagtttagatattattagttccagataagcttccattttgctttataaaagtctgcattttggaatatctgcaattattttgactatagtttctgtttagcgtaatttaaatctcacgaccgccttggataaactttctgactattttggcttatgatgaggccatcatgctcatgatcctagtactgtttctacttggtagtaccatgttccatgatccatcattttgagtttgtaattttgacaattgtgtaccttttaattgttttatgttaatatgcacttttcagttcaccgacaagcacctctttcaatgaagattgtgcacttctattttgtgggaggaaataatgtgtgtttatcttgcagacattgcagtgagatacatgttggatctgttggacaccctttccgaacatgcaaaggaatgtcttcagataaacgtagggggcaacatgactggggaggtactttggttgaagctgtttttgtgccggttgaagcctaccatctagaggatcgcttagggaagcgtatccctcatgatcagaggtttgctgtacctcgcatccctgctcttgtggagttatgcattcaagctggagttaatcttcctgaataccccacaaagcggcgaagaaagcccattattaaaatcggaaagaacgagtttgttgatgcaaatgaggatgacctaccagacccagagccttacaaacttgagcatccaattcttgaagaactaaatgataacgagattattgccccagcaagcccagaggagattgttgctctagctgaggaaacactcgaagcatgggaggtagtcagggatggtgccttgaagcttatgaagggctacgcggtgcgggtttgtggatactgcccagaggttcatataggagcaagtggccacaaagcacggaattgtggtgccttcaaacaccagcagaggaatgggcagcatggatggcaagcagcagtgctcgatgacttaatacctcctagatatgtgtggcacctgccagaatccggggaggacttgcagagggatctaaagagtttctatgggcaggcacctgcgattgtggagatatgtgttcaggctggtgcaaaggtgccggagaagtacaaagccacaatgagactagatataggaattccaacaagtttgagagaggccgaaatggtcgtctgaacaaagacgtttctattgtcacctcaagctccagtttgtctgaccagaggttcacagttttactcatgtatataccaggaaggcaggaaattagctcaaacagaatttgtctaggtctgtattgtttgtaccatatgctcgctatcatttaccaaattcttctttgtatgaggcatggatgtttcttacagcagttcgagatgcatttgctaatgctgatatggtttatatggtgagctgtgttttgtgtgaaaagtgaacaccaataaaatatcctggtattaacacagtcagcaattcttgccttgaacaacagaaaatgagtcacaaactttcatctgattcactgcattctgagggattgcatgacaatatacacccatttgtgctccctggccagcttctgttcctatctgaccatctacaaggggcgacagaaatgacagaaatctaaggtacaccgcattcagccataaactaacagaatcacactagccactcgaaatattttttgacattagaaccatatatataagcgccaaaaaggagtccccattcatgcaatgcacaaggtcttggcgtagctggacaactgcatttgggatgttttcacagcataaattcatgaactaactgtctgatcttcacaatgcggttggggctccacggccgtcctgaacaacagtatatagaccttatcaacggaaaagtacaagaatccaccccgggcatgggtgacatatgaaccgaaactcgtccctacgatgcagtgccaagctggtccataagcagtgtcaaactcctgcagcgaaggataagctcccatcatttatatagtattgcatatggaagtagatgaacatggacaaaatgacgagttatagaatttgtggacaaataataggaagtgcggttgcttgataagcatggaccaaaaaaattgtggaatggtcccagatttggttgctgattggttggagattgtgcaggattcaggcacgcggagaagattttagggttagttaggtccaactagaattgcaggatgaaaaataaaatgttttgcctactggtcagcatggtcaaactaagccaataagctaaatagctaataacacgtcctatgtaaaacattcggttctgttagatcccttatccaaggtacagatagaatttggacgttattctcacattgggcaagaactgaatatttatgagtggcagacaaaactttaccaagatatgcaaattaaagttctataggctgtgtttagatccaggggtgaaaagttttggcgtgacacatcgaatatacggacacacatttaaagtattaaacgtagattaataacaaaacaaattacagatttcacatgtaaactgcgagacgaatttattaagcctaattaatccgtcattagacaatatttattgtagcaccacattgtcaaatcatggagcaattaggcttaaaagattcgtattgcaatttacacgcaacctgtgtaattatttttttatctatatttaatactccatgcatgtgtccaaacattcgatatgacagggtgaaaagtttttgcgtgggaactaaacagggtcataatcgagtgatgcattcccatgctcaaacttgcaattccttttgcacaagacaaagagtcaatgacagatcgacaaccagatgatatgaccacctgattgcgcaacgtattaatgctagcaatggtagttaggagtacatgctagattgcatgaggaaatcttagcacacccacaacgaagagccaaagtttcattcagcttgaccctactgcttaggtgttcagaaactgatacttgagctgcctatgattctctgacccttccagttttgccatgacaaacaacaggccaatttgggtttcaggtgcatgaagatagctacagcctacaggggctaccaaaatcatcatttacgcaacaaccaaatggggtgatcaatcagcatggacatgaatgcacttgacaaacatcttaaatccttatcacggtaagccagtaataaggccccgacaaaggatacgtgctactggtacatcagttatgactgcgttgccgtgagaagcatgtgcaagcattgtgcgaatgcatttactccaagaaccaacactgctcgacgcgatcagttaagcacctactatcggaagcttaattagtcatggcaaggaagattctgtcctcactgaagaacagtctcaggtaatctaatgaacaagtggagaaaaacagcagcggacaaatgattaatcagttaattccattggctaatgcatctttgggagcaaactgactactcgagggccctgttcttccagatacgcaagctaactctacaaccaatttgcaggtacagtaatggagttctggtacttacgcaaggtaagtacaccggctaagaaatgtactatactaaccttcttgagggcgagggcgaggcgcttgggctcgagccgccgcggggagcgcggcatcccggcgagctcgtcgcgggcgcagcggaacgcgcgccgctgcagcgcgggcggcatgtcggccgccaccaccctcaccaccgccttcctctcctcgccgccgccgtcccccgcccccgccttcctcggcaatcccccctcggcggcggcggcgccctccgcgatcgcgccgaggccgagcagcgccctgacaaccccaccccggcgccccgccgcctgcaggccaccctcctcctgctccctcatgctcggtcgccgctcgccgttcccgccggccgcgccgggagctttgactcaccggaagcagagactctctctcactctcctctctgtgttactgtgtatgtgtcagtatgtgtgtgtattattattattatttttttggcgcttgggcagcggttggggcggctttatcgttcgttggggttcgttaaagttggcgtcgtggcgtctccgcttttctttgttttttgttttccctctctgcccggggagcgcgccggcgggatcaccgaccgcgcgcgagagagagagcgcggcgaattccgggtcgcctcgcgttcgcgtacgtattcagcccgccgatgcacgcggccggtcggctacacggcctccgcgagatcgcgaccgagcggaccgttgctcgcgcgggacgggggacgagcactagcagcgcagcctgcgctgctgctccgtgccagtgtaccgctgctccgggtctatttactgcgagaccgttgggacggacggacacggagagcctgagaggcgttgcgtcaccgtgggggtagcagtaaactcggatggagttattgctgtgcgcctgtgctgttcatgtggatcccacggtgcatcgccctcgcgcgatgtggcgatcaggtggacggcgtgggtgacgtatacggttccgttagttgttgggctttgggatcatggcccggatatggcggatgggccacttggtggtagcgtccctcggtttatccgatttggagaaggaataagttcactttagatctcttaatttatcgtcgagtgtaaaattcgttcctaaaccgcaataccagatatggcttgtccgtcaactcttaaaactagtgcaaataaggttagcagtttggatggcagttttggcaaacccaacatcatcacccccaaccccctatttcccttcttctcttccttcctcctctctctccctttccttgtcatcattggtgcacccgcagctacggcatcggcaggaccgcatgagcatggtgtcagcgtcggcgcaggaggagggcatcaacggcgtgggagcatctccttcgaccacgtgcctcattccccttccttcccccgcggttgtgtcggcataggaggagggtgtcggtggtgcgggatggcgggaacagctcccccctccccatgctcattgggttggccaagttctttccacgttcgtagctgcctgacgagtttatcccccgcacccggggtcggctaggtccttcctgcccacgccatggctagtgagctcctccccgtctgcatgtacatccaactgccctcctccgagcgcgcggatgacggatccgaccgagaagcgatggcgtggcacggatgtggttggcggacgatgagtcgggagaggatgaggaaaaggtcgccgttgtcgagctagtccctccatggctagctcgttactccatggcgagatcgtcctcgcatgccgtgccctgcccgtgggagaggagcggtcgtggcgcctttgtcgcggcgaagcatacgccatcgctctgccgcagtagctcagccatcaacatgtgtggggaggaccgacaaactgctccctgttgatgtagacgaacgacactacgggacagacgtagcagcatatgtgacttcggatcgctacagctcgcgctgctcgtgcagcaagagatcaagcagagaatagccggagcgtcaccatcgaccagagtctgcagaatagggggagaaatagagtcaccaccgccgctcgaggatcagacccgggctcgccaccaccattgagaagcaggaattcatcgctaccgtgcccctggctaaccaccgccaaactctatctctatctctccctaactaatccatgtgtgtgtcgatcgccatttccagtccggcgctctctcatgtgccgcttgcccagctcctctcccgccacatgttgctcgcatttggggagagatattgagggaagaaggcgcgccaacccagaggagatagcgaggggacgaggtgaggtggatgaagtggggcttattaacatgtgggtactactattttttatctttctatttgatttctccatatttttttaatcttgcttcgaatgccacgtcaacatcacgtgagacgaggactaagtcaaaccagccacctaggtgccacatcagataaaaacgccatccaaaccgctttgggacctcgtctgcactggtttgaaaatttgagggacgcattatatctattatgattcaaaaatatgatacaaactctacgtcatgatgagagatctaaagtgaacttattcgtttggagaactaatggatcattgggctggtttcattcattcgtgaccatacaggcctttcagattttgcaagcaactttgccgaaaggctcaaataggaacacgacccaacaacagccgacagatggccatcacgtgctcacggcgccggtccctcctccagtcctcctcccaaattttttccaggttagactcgattcttgcagcactactgtactactagatggacagtgacgtttgctaatgaacaggaaagctgccaatccaactccagcaatattggcgctggataatgctttttttttctttctctagagggtacaaacgaacggatatggggtagacatttcatgccactaatgacattatctagtatgagcatctttcttatgcaacatataaccccagcggcgtatttagaatttatgatatgggtggtccaacttataaaaatttttaaacattgcggatataataattttaatatatacaatataaatataggtaatagaaccatttcttccgcatcttgtttaaagtatactcttctgtcataactaggaaaggaagtagagtaattcagaagcattttttttacatgtttctgaaaatgagatgaaatatctacatatttcgttatgttttaagaatctacaatacaatagtataattttagatgtatgagttgggtcaaaactgaaaattgaatgcctaatatggttctaatctgctaatcagtaggagtaattaattgctctttgttggttccttcccttgcagctcgcgcagatcccagttggccaatgccctagatgcaggcgctgatcgctgcacgtcgccgtcggccgccgcagccgcactagcactccggcgcccttgcttccttgcgcttgttgttggcccatcgtcacttgatccccaggaagtagggaagagaaggagcagccagcaacaaaccgccgtgctatgcacgcgtgatggcgccgctgctacaaccggtcaatcgcgcgaggagaaggagatggagtcgcggtagcggagagggagcggaaacggcgtcgcttcgtttggaagcttcagcctcacgggatttttttcctttttcttttttaccaaaaaaaaaatcatgttgggtcgctaatttttttggtggtctggggaccaccggaccacccattagatccgccgttgtataacccgcgatatttttgaaaatgacaatataacccataatctcgttgcaccaacaaagttagaaatgtggtgagaatggaaagtgggaaggaagctcttcgggttcttatctagttttggaagtactaatgtgtacttaagggggacagttcgttctgatgggggtaacctaggatgattaggcagcaatgtgcaccccatggctctgtggccaatctccttgcaatgtgctttatttattagccattaaccttgctgtatcatataaaatctatagcttttgccgtgccaaccacaatcgtccatcactgtgtgctactgttttactgtcgcatgacgataggagccgctcgatccattgtcagcctccatccagccgtttgttttttccattgcgttccaccagcttctaggtattcccacgagtgtacgcatcgacgccgccgccgcggcttgggacgattctccgtatctgctcctgcgagttccttcgcgtatctgccatcgccgctccactgtgctcgcctttcccctctccaccatgccaccttgaccttgctccccgacgacctctaccacgccactgcttgtcctactgaggaagcggtggcggcgccacgcctccaccaacacccggcgcccgtgggtgcacgccgcgccgtcacggacgcgggacgccgttcctcgcatcgcctcagcgcctcgcggggagccagcgacggtggccaactctctccgctctctggccgggcggccggcggcagtccggctctccgcgactccgcctgtccgccactcggacgaggcggcaactccgcctctcctcgcgtgtcgttgtgcctcgccggtcgcagccgtctccgctcccactctgcctctcctcgcccgcataaatctctgctccaactcccgctatccgtcgcgccgctaccgcctagccagccaccggccgccgataccgggagccagggaggtcgtggcgtgtagcacagcaggcagtagcagtgcgccggtgccaccttcggccttcgcccttcgattccggccttcccctgcaggtactttacaggtctgctcctttacctaatatgctctatactgatttttaattgaaacttgctctgtgctatcaatttgttatttttgattgtcgatttgtgattgtctattagactactatcataatgtcattgccgatttgtgattagtgaatatgcattttttgtgggccattccatagtcatgaatatgtggttacaacatatgtttgcttatttacacggcaagattattatatcgtgtgccccaatgacaggaaaaattagtgcgtaaaatgggaagtgttttacctagcctatagtgcttacttctttaatcagtagattgggagtttaggactttgcctttctgaatgctcaaattgtattctcagattgcatttaggtgcattcacaatcttttatggcaatatgtcatggttaattacatattctgcatgtagcatccaacctgaaaaccatacaattactgcagcatttattcctagcaatagagcatctctgcgagcagatgatgacatctttgtgctgtaagctatttctgtagaagtatatgtcttaaaagttatactatttggtaatgtttctaaatctatccattttcaaccttgagttcagctttctgcagtacacgatcccttcaaacaaaattaaatagctaataatttaattaccggtattcagaggacactttgacttttgtacttatcactgatggaaaattgagaacacttccctttttctggatagaatctctgctttgacctgataactttattataacatgttaaggtatggtattgcatatacacattgaaaaatattcccgagataaccaaacatggttactaatgaaaagtttgggaatttacaacctgtctatggctattcccttcatgtcctgctaaacaaaaatcaaccatccaattcaatatatttgtcaagttgtggtacttcctagctttaagaatttttatggtgtctactttacatggtctgctgctgattaatcacggcatatatatattatatagtaattgctttttttgtctgacttatcattctcttttcctgaaccattcattattcagttttactgccataaatcaagctggaatcatgtttgcctgcaccaaccatgatctgtagaatgcttttaaacaggcatacaacacaccattagggaataatctacaaggtttgggccatataacttcccttttatatactttcttttgcacttattttccaaatttatcggttgtatgtacatgatagataatactgtcccagcattgaccaatgtttgaagttcaattgtagcaggtccaatgcttgctttgagtacaaaaatgttttatgttttgacagtgcttttttttcaccagctacagatcaataggaactacaattatatttcattttgtcattcacaccttagcttccagttcactaaatggggatgaaggctgaagtcaacagagatatgaactgtagggaaaatgtaccttttgttactttgattaggaagattgaatgttaatttcaagatgcaaatggagatcaattttcagtctttcatatgtcagcttaagtttgttctgttaaaaatgaaatgaaacttgatttcaatgcaaatgctggggagggagttctagatctcaaaataaaatgctatctttgcttgctctatatgcgcttagcccctcatgagcggtgatcttcatgtaccatattactcacattacctgtatttttttgaatatctactgtattttttagagcatctgtgacggtgcaattataattgttcattcttgacatgcactatgcaggaatattgcttcaaggcaaaagaacgagacaacatattaggttatcccattatgaacagttaggttgagctgcaccttacatggtgggatcactatccatattttattacacacatgtaatctatttatttaaactgccctgtcaatccaatctactttatatccttatcttggtgctagcaatatattcaaatagctttgcaatatggatctatgttgattactacttatcaacgaattgccagtatggacatatgttgacaaggtgacatcacaacatgtatatacaacgtagaatctatatacatcaactgtgtcttgtgcttcacaactactccctccgtgtcacaatataagggattttcagtttttgcttgtaacgtttgaccactcgtcttattcaaattttttttgcaaatataaaaaataaaaagttgtgcttaaagtactatagataataaagtaagtcacaaataaaataattaataatttcaaaaaattttgaataagacgagtggtcaaacgttacaagcaaaaactcaaaatctcttatattatgggacggagggagtatatgtgtggagctttccaagtccacaaaacatttaagttttcttttacctatcagtatatgctatattattctaatatgtgcatagatatatcttactccgttgcaatgtctctttgtaatttcaaatttatttttgtatagttcaaataactaatgtggttacaagcattacccgcagcaacgcgcggggccactgactagtttctaatatgcacacatggctctgtggccaatctccttgcaatgtgctttatttggcctttaaccttgctgtatttctaacatgcagagaatgtttttttttttgaaggaaaaaatttggaatactaagaaggaatttagcattcaatattgatagagaagaaattggtgagaaaacctgcgttcgaagggattcgaacctaggccagcacgttgctcctggcagctccctgccagccgagctaggtgccgttctcaatatgcagagaatgttgcacctaagcatcttaacaagactggtcgttccacgagggcaagagcaatacaagctcctcgtaagagggaccttgtgcctaaaaggtgtgccatgtggtaagagggaccttgtgcctaaaaggtgtgccatgtgggatgacgctactactaagaaactcagttcacaatggagatcaactagatatttctattttcctctccatctccctctcgtacgttcccctatccgcctccctcttgtgcatcgctgttgctgtgatcctcttcgctggtcgcgctcctcccctcctccatctccgaccaccgtgcatcccctcctccatctccggccgttgtgccttcccttcttttctcttgccgccaagtcttcccttcctcctccgtgcatggatccatgttcattgttaccaaattgagtttagacggcgcgaatcgttcttcggcagtgtgaattgagctcgggtggggcgaagcaatctccaatagtgctaatcgagcactaacggtggatcgagactgagcggtgtggcagatcaatctcgggtagcatagagaggtggacaatggcgagctccttgacgcggtggtgcagttcgagggacgacaggctccctcccaagccgtcgagacgagctccctcaccagccaccaagacaagctctctctccggcctccctctcccttccccttgcggtgcgggatgtgaactatgggtcagacctgacgaatcctgacacattctaacgaggaacgtgtgctcagactaggatccgcagacgtggcatagaatctttggcgtggcttgttggtgcagaatgatacctactcgcattgtgaaagccctgagtacatggtccagcgataatgtgcagcatggtaatctttcttgagccatttgcgtattgtggtgttttccgtgaaacacgtacgaatggtctcggcatggccaaaagcaactcgagaacatacagttccggccgttggttggcactcaacatgccatttcacctactagaaagtacgggcaactttccaatcttatagactcggtcacgactcacgagctgtctcggacgttcttaaacgcacgcaccaaaactgccgttgccactagtgatatcactgcgcgagccgcaggctgccaggctcccccaccgctccaccgccgcgcgctgtgtccgtcaaaagcgtcgaagcgtgcagcgacgatctttccgtcttttcccggcaagaaccttgcctagctttagctagccaagctgcatcagagcgtgcaagccaagtggcggtagcctcaccgaactggctggacgcgaagtggacgggaactcgtctctttacttctctagccgttggatcgatcgatcagccggtcagatatacgcggacacttgccatcgcccgtccgtcaatgcctgcaaaattccaagaaaacgggttttgcaagggcaggccggcaggcattctccttccttcgtcatcttcttctccaggtctgctttaacggctctccgtccttcgcctcagcaacctagtaactgcactctcactgtgccgggggatccatgctacggtgccctttgcatgccccggcccaacggtcacatttaacaaaaaccgccggatctcatgacggcgatggccgaaatgccgtgggaccgggtcgtcagctcctctgtctctgccgtgattgatggtgtcgtagattgcaatgcacggatcgatctaaaggtctactgtgcttatggatgtttggcacgcgattaaagcctagaactacgcttgttataaggacagtatgcatgttccagattatgggcagaaatagcggcattagcgtagaacaaaaaaatagtggcattagagtaacaaactttcaacggagacgctgagcagattttatctcagtgggtaaaaatactgaaggacgagcaaggtgaaaagtgaaaacacgattgatcacggggaggagcaatgacccggcattgaaaaacaacacaccacgcagagctgtataactaatggaatgaaatgtaaaagtcgaaactctagctgtcgcttgtagtactactcgtttcaaagagcctgtttgctggagtatactactgatcagtgatcactggctgcccgtacgcccaaatctggcaattacaacttcggatagaacaatccaaggtttccaaaaggtcagacttcgtaggagtaaaatacattcccaggtactaagggggtgtttgggagagaggggctaaaccccctaaaccgcaccattatactccagctgcagtctttccagaggtccaacggccgaaacgaaccaaactaaccaaccaacctttcacagcacagtacgcctcctccgccgcaacgttcgccgcatccacgcgtcggcgcctcactggcccttgccccagcatcctaggctgttttttctccccatggtccaacggtcccacccgtcattccgtccgaacatgtctgcggccgtcacgtgcagtatttatccgccgacccgttcggctccggctcactggcatccacctcactcgcctccctggcattattaaaccccgcctcgttgccaagccgatcactctgtgcaacaccgtgcggtagcagagcaagagcagcaaaaaaaaaaaccaccacgcctcgttcagtcactcgcacgctcgctcgatcacccggccgccgcgaagcgtcgaccgaagtgtatcgcacatttcgaaagttcttcgcgggcaacagaaagcagtttgtggtgtgcattgccgatttgccattgcgttgggttcatttcttccatcggcaatgctggcggcgtcgttgagagtcgaggcggtggcggtggttgctgcggctgtgctggtgctgctgctctcgccggctgcggtggtggtggtggccgggcagcatgattacggcgacgcgctccataagagcatactgttctttgagggacagcgctccggcaggcttcctcccgaccagcgtctccgctggcgccgcgactccggcctccacgacggcgccgccgccagcgtacgtattctcgtcctataacttggcgttaagaatgtactactggtgaagcagcattgtgatttgtgagtaacctgctgtggccgcgtgtaggtggacttgaccggagggtactacgacgccggcgacaacgtgaagttcgggttcccgatggcgttcacggcgacgctgatgtcgtgggggctgatcgacttcgggcggagcttcgggccgcacaaggaggaggcgaggaaggcggtgcggtgggcgacggactacctgatgaaggcgacggcgaagcccaacaccgtgtacgtgcaggtcggcgacgccttccgcgaccactcgtgctgggagcgccccgaggacatggacacgccccgcaccgtctacaaggtcgacccctcccaccccggctccgacgtcgccgccgagaccgccgccgccctcgccgccggctccatcgtcttccgcgacgccgaccccgcctactccaagcgcctcctcgaccgcgccatcgccgtaagtacaccagtgcgcgccaccgcggcagcattgatttcgattgtttcctcatgtccacgttatctgcttcgtgtactcctaggtgttcgagttcgcggacaagtaccggggcccctacagcagcagcctccacgacgcggtgtgcccctgctactgcgacttctccgggtacaaggacgagctgctctggggcgcggcgtggctgcacaaggcgtcgcgccgccgcgagtaccgcgagtacatcaagaagaacgaggtggtgctcggcgccagcgagtccatcaacgagttcggctgggacaacaagcacgccggcatcaacgtcctcatctccaaggtaaatgcaccattcctccatgattttactactgtgtgccgatgctgacgcgcttttcaaagaagcctcgtcatttttggcagcttcattatgccttcgtctttcacaaagagttgcccaaaccgcaagttatccggtagtactcttgaaacctctttttactgttaataataaagatctactaatgactgcataactgactgcgtacggaattgaaccttttaagttttaacccttttagctttacatgtgggctcaatcaggtttgttctgaacttctgatgcttgtctttgaatactcaaagagtcaaagtaagccagtacaccctgacggccgtgacaggagaactgatagtatcacgtagagtacgtactccgtaatactatactgctagtaatagcgtactttgactagcagcctaatccatcatactccctccgttccataatataaagtatacatgtatgtaagtaattaactatgacttattctctattaattattttttaatcctctctcatgttctctaattttaagagcacccgcaatggtaaagtaaagtgctctctataaaacatgttcatctcagcaatagactagattaatagtaaaccacctcaatagtatgtctacatgggtatctatacctctctcatgcattgcctcgtttttctctatagattatctctaagttagtagatagctttgctctctctattcatttaatatcttccaagtaggaaaatatgctgacatgaatctcttgtagagagcttatagataaccattgtgggtgccctaatggatgcatgcaatgtatttattaggatgatccatactacaatatgataataattattttttggtatttgggttaagggtggttatgccttagaacaagtataatagtgagctataagcctactataagcttaggtggataagagagatactgaaaaatcaaagttgtgggctctcatgcaagagctagcttatcacaagatccaagacaaatacattaaatgcataagtgagagatagagagaagataagaaaaatataaccaatcttatagctaatctattatatatattggctttaagatgaattaatagtaggaactgagctagtatactgctattatattttggaacggagggagtactagtagagtagtagtgtacgactactgtatgagcatgcttgtccgttgcactgcactcctcctatgatagcctcctaggtccttgtgctccggttgctgcccgtgctgcagtctactgtagaagtagcagggaagaacgcttttcagtgctcacggtcacgggtcgatcgattctctcgtgcaatgtccaaaacaccctgagttctagccttctaggggccagtactacaaacaactgtactaccagtaggagtattactgtactgcttacgttaattaatcttgcgttactccaggaggttctgatggggaaggacgagtacttccagtcgttccgtgtcaacgccgacaacttcatgtgcagcctcctcccgggcatctctaatcacccccagatccagtactccccaggttaatcaatctctctatcaccatctctctctctctctctcttttctcagctagaaccgcagctcttaaatttgttgtgttggcattgcaatgcaggtgggctgctgttcaaggttgggggcagcaacatgcagcacgtgacatcgctgtcgttcctgctgctcgcctactccaactacctgagccacgccggcgcgcgggtgtcgtgcggcgcgggcggctcggcgtcgccgacgcagctccgccgcgtggccaagcgccaggtggactacatcctcggcgacaacccgctgcggatgtcgtacatggtgggctacggcgccaggttcccgcggcggatccaccaccgcgggagctccctcccgtccgtcgccgcgcacccggcgcggatcgggtgcaagggcggcgccgcctactacgccagcgcggcgcccaaccccaacctgctggtgggcgccgtcgtgggcgggcccagcgacgccacggacgcgttccccgacgcgcgcgccgtgttccagcagtcggagcccaccacgtacatcaacgcgccgctcatgggcctcctcgcctacttctccgcccacccaaacccagccgagtgggccgacgactagaacaacccgccaaagtatatcagctatacgggcctgggctattgtttgttttgtcagggccgaatcgggtgattattgcctggttgattgatactacttgtgtaaccaaatatagttaacttcctctacaaaaccccaacaaagtatagttaactgcagccacctcctttcatgcgaaaaatatcggccaggaggaatgcataggctttattaggctgctactcctactagcaatgttgtaacagtactgtagacatagttacacttgtactgctatggttcagcgagtggattatatataaagtgcaccaccgacgtttcctctgaacaaatgctgcaccctgtgtactgaattcaccctgtcagacgctgactcaggcgactagtgacaatccaatggaccagcaaaggcagcagaggcggggatcacatgtcgagcttctgttcacgggtgaaatccgtgaatctctccgctgcgtacttgtgctggcacctggcgggcatcactagaacggtgtggtcggtgggtctcgatctctctcaatcgtcatgcctattttcaactacatcaggtgcaaatttccaaattcttggtagtaatttcaatcacgaatacgcaggaaatcattgttcatcagtaatgcttgcttgctatcgtaagttcatttactcaaacttaaaagcagaacaagtgtaatgacaaatcaggctccgccgctgcagatggcggtgagcagcaccggcagcctcactagcgacgacgacgtcgcctgcgccgacctccgcagctgccacttggccctctcctcccgcgcaggcagcgctctcccgttgtcgaacagcggcgtcgacgacttcctctcctccacgccgtcgccggagagcagcccggtgcccgcgagctgcctctccatgtgcaagaagtggcccagcgacgtcgtgccgccggcgtcgtccctgcaaaggcgccaccagctgccgccggcgccgcgccagcgcctacgcctccacctcctgcgccaccgccgcccgtcctcctcctcctctgccgcggcggcgcggggcctctcactctcctcccctccgtcccgcgccgcctccccctgctgctgctgctgctcctcgtcgtcgtcgaaggaaacgcccatgagcgtccccagcgtcgtgctccggtcccgaaagaacgacgaccccgtggactacaacagagcaacatccacacccatatcaagatctccaaaacaaatgaaatggcacggctaatgattctttgtgtacctcggtgtcgacatcggaggaagagggtgacgtctcggcggaggacgaggtcggtatcatgccagcgtcgccgtccatatcctctccttccggccggcggctcaatgggtgaagtgtgatcgtgatgtgctctagaaaaacttatctgcttctcccgtcgaatcgagggaagtatatggccgcggtagtggtgttttctatgcgggctgcgactgcgagccgcagacgcgggggtcgcagtggcgcaaggcaacaacggtcaagggaaatgaatgaatactccagcttgagctttgagcctctgacagtctgactgaatgtggggtagaggcaatcaggcgaagagcgtaggttccctacaataagcgactttcaaggcggtgtttgactgaactgttaacaaacagtgagctcctgccgattatattaattaagacaccttctaatcagactcgttggattagagcaagtttaatagtatagcccactaataactctaattcatatatagccaatctaatagcaatttatacaatagttgcttactatactattaatatatatacccacttgtcatacatacattgcgtcttgtagtccgtgctgcagctggctacagatatgtagcccgctgctcttctctctcattctttatttcattaaaatatgtttacagctggctaatagcctgctattatacctgctcttagggaagaaccgaagaactgatacatgggcgtgggtcccaattcccaaacgtttaagagcaagtttaatagtataactcactactacctccaattcatttatactcaatctaatagtcaatttatgcaaatagttgcttactgtactgttaatatatggtctcacctgtcatacacatattgcatcttagagttcgtgctgcagctagttatagaactgcagtccactgcttttctctctcatcttttactatctcactgaaatatatttatagttggctaatagtattctattatacctgctgctctaagcacgtggatactgaatgatcgtacagcagaaaagagctgcaagcgggtactatacaggaatacatgccaccactacaccgctacgcaaggatggaacgtatcggtatttttcagcccgaagaatcaaatcatcagcggtgcagtgccagtgcgcacgatgcacacatggagtcgacctgcaatggcctcacgtatgatggatttctcacgggcgggcacgcatgggcggagcgtcacgcgtccgttccttccggtgcgcggagccgtgcaaaatataataaccgtgtgggaatcccaaagtcaataggcagtagtaaaaaaagaggaacagtcgtgcagtaaaaacaaaaattagttgctcacctttaacttcggctcatgcaaacaaaacgtaaacgcggtaatttggagtagatagatactcctcgttatgtggtggctgtttaagcagcgagaggaaatcaactaagcagttaaaagtttttaaaaatcaactgacaagtatggttattctgttattctgcaccagataggtccttgaaacgatcaatatatcaagcagaatgaatcaaaaaaacatttatcaagccgaaaagcaatactcaagtttgcatacctatttcattgaaatttcccatgcatttgggatcatgcattggcatatcaccatatcagtattcatctaactgccctttcagccaaaaaaaaaaaaacccgctcgtttcattgagattttccaatacatttggactcatccatatcagtattcgtcaaattaactatgctttcaccaaaaaaaagtcccaagtagtttcgatctgaccactaaaaacgccacacgaactaccaaaaaagtcccaactagtttcaatctgaccactaaaaacgccacacaaacttagttgggtgaggctaatagatcgaagcaattagaatgcgaaatcctaaagcgaatcctgattaacaactggggctaagttcagtagtagtaggtacatacgacgatgcgcggcgagtgacgagacgatggccggtcgggtggatcacgcctgcttgctcatcatggccttgaactcgtcgaaggagatgaccccgtcgccgtcgctgtccacggccgcgacgatctccgcgcactgctcagccgtcagatccatcccgtcgaggttcagcctacgcagcgcgcggcgcagctcctccgccgtgatcacaccgttcccgtcctcgtcgtactcgtcgaacgcggcgcgcagcgcgtccaatcccccgccctccatcaccgcgcggagctcctcgatgctgacgaacccgtccccgtccctgtccgcggcggcgaccatctcctcggcctcgtccaccgagcacccgtagaactccctcatctccgcggccgagatgaggccgtcgccgtcggtgtcgaagcagcggaagacgcggatcagctccggctcggcctcccgctccaaggacaacggggactgggagggatccaggacagccgggggcggcgagcggctgcggctgcggcggaggcgaccacatgaggcggcggcggaaacgacgagacccatggcgagacagatggtgcggcgcgcgtttccgttttgatcggtgtgtaggtttgggggtttggggctctcgggcgatggggttggttttggtcctcttttatttagcgcttgagtcgcttgaccagagatggtcttcaacggggcccacaaaacttgccgctgtgtgtttggctggcgacaagggtagtgccaatctgtgccatgctaatattttggaagtttgaaatatcattttggtagtatttggattgtgactaatttttacatagctaataataaatctactctatcaaatttagtagtgccaaaacttagtaccaatattttggtagggcctcaaaccaaatctagattacggccagcttgaaactggtaaatcgaccacaaacattgttgaagcgaatgatattggctaagagtgggtgacataagtagatagaaattactatatcaaatttgcgttgaggtgaaggagatataagataaaagagaaaaatatggtctataaatttcaaccgtatcacggactcgtgggttagatattaataatttagtatatatatccataacaaacagttgtatgagtatatctataccgagctattatataactagactataagattgacaaaatatgttaattattacatttggtacgtattaactataccaccgatcttaataactcttaaggctctcttagtttcatatgtggtatgctattgttgccatcaacgaatagagctttacattaaatgtgaagagcttttttttttaaaaaaaatgtgaagtaacatatatccacccgatgtacgaccagggagacgggtgatgcgatggtgctggcgtggtcgccactcgcactatcatgactgcttctaggaagaggtgtggagtgttaggtggaatagttggttgccatgcagcccgaccaagccaatgactcccttgcacgtccttttacttgaggccgacaaagtggacaccacaaacatccgcaagtacaccggttgccttttccatatcccatacgtgcgcggaggacgtgcaacacgcctccaactcagctggcttgaaaaggggcctatgtggactcaagaattgggttcacttgtcaataaggtacaagaataatcatacctaacccttgtgcataagaattcatttgtaaggagatggccaatgtggtatctccatgaactgtgagggtaatagcaatgtttaaggtcttagaggaaataagttaggtcccaccataccctatgtttatgacgacaatgtttaaggtaagaatagatgttaagatgggtcccgcgtttatgtaaacaaattttacattaaggtgggtcccaccataccataatctattctcatcctctttagtgtgcatatgtgatttatctcattattttattttttaaggttgagccataaacttatggctatttttagcatttaatgtctcatggctaatgctcataatgtatatggctagtcataagatcttatggctcattattatggcacattgtggatgccctaagaagagaggcatgaccacgtagaaaggggaccccagatctaaaccaagaaaaaaaagaataaggaaaagcaactcttaactcttgactactaccacaaatccaaaaaaggaacaccacactagggtgttatttatgcttctcagttacctaaaccaatataatttctttgctctcgcttgcatttacaccatgattactcctaatcatgaactcctgtttcttgggctgaacttagctgcgacgagagggggtggggtggggtcatccatttctcgctagagtagttcaatttccaacaacggcactcctccgccctattcgatcccctcctcaccccgccgttctacgtctaaagtgtaaggataatttgtattttcccgacaaggcccccgcgtcgcctcctcgtgagggcggcacgggcggcgacaacccgagacgccgtcgcaacccagcgccgtcgccccctacctcgccgccgcccgaacgaggtgccggcaaagccagcggctcgcgaggacggcagcggcggggttcacaactcccgtttctccagatccagcgcgggaagatctcgagacggaggttggcggcaccgtttcggcagcgggtggagacggcggcttgcgaccgagagcaggcgacggggtgggtggaggtagtgagaagcccggctggcgacggggcggaggagacggcgctggtggctgtggcgccagcgccggtcggcgtgtagcccgacaggcaacggagagggggagacgacggtggcggggtagaggaggcgggggcagcgacgggacgttggaggaggtgttgcgctgtggcttccccctagccacgctggcggtggaggaagaggccggcaaatccgcgccttgatctggcgggcaggcatccggcggcgccccggtggttgactagcggcggcggcggctgcatctgtggatgcggtggccggcgtcggggcaagttgcgggcgtcgatggctgcggctggcggtggagggagcgtcggcgcggcggcgctggaggccgtgatggccgtggaggggcaggaggccacgccctcggcggagggcggcatgcggggggccggcgtggtggaggcgcggctggcggctcgaccaagagcccgtctttgccattgtttacgaggtatggtacttgcgagtcattatgcgagaccttctatggccgtcgatggggtgcttgtgtgggtgatatgaagacgctggcgaaagccttgccgtgcctttggccggtttgacgacgacgcccgtaggcgccgtttcccttcttggaggtgttgtcgtggcgtttttcttctatatcgcccacaaatatctaggtaaaaaccttgttccggtttcggacgagcggcgccgatgttatgcatcatgtcctccttggcggcatcgcttcagagaagttcctatgaatcgatgactgttgatggtctttctcggttcaaaagctttcataccttggtgttcggcgaggcctttgtcttcttgagtccacttagttcttgtggtgggcaacacgctcttcggttgtttctactgatgaagtcggagctgctcgttgatggggtgcggcgatgctcgacaacgatgacatgctgcagtctcttctatggagttggtgctagccgtgtgaaggaagtggctccttggtggcttggctgatgtccatcgttagatatcggagctgtttttcgctttggcgactttcgtggcttagtgtcactgcggttgtgaagtcggcgctgctagattgcttgcgcgattagctcggcaacgataacacctcttctgcgatgtcgaagccgttgagtcgcttttgtgattagcttggcagcgatgtcctgcggttgggctccgccgtcgttgttagttttgtagctaggtcccttgctcttctctgcgtggtgggttttagccagtttcccacaattaaccgtgcaattgtttgtttttcgggtccggttttccttataaagtgggtcaattctcttcttcttcaatacaaagacaccttgcgtggtttcaaattttttttcccaacgacgacaatctaaacatgtatcaaatatcaacctcatcgtaatacgacttattagagattgcaaaaataattttaagagtatttttttatatactccctccgtttcaaaatgtttgacaccgttgactttttaatacgtgtttgaccattcatcttattcaaaaaatttaagtaattattaattctttttatatcatttgattcattgttaaatatactttcatgtacatatatagttttacatatttcacaaatttttttaataagacgaacagtcaaacatgtgctaaaaagtcaacggtgtcaaatattttgaaacggagggagtatttgttattagatatttaaaaacaaatgttggaaaaaataattacgttgaaaaaccccaaaattaagtcttaaattcagttttagaatttaaatttacgattttgcttttatgcggaaggcggaacgatagggtgttatcaaacttaccatgttttggttttgctaaaatttagatgagttcattttggcatcaaattaattacacttttagtgcaaggagagacgcgaatgacttgttctatgacagtgctagtagtgtgccgaaggacgatgatatccacatgacgatcatcagcaaccaagccctgatttcgacgattctgtacacgcatttgaaactggaaactcgaaatcgtatgactaggcagaaaacaagaccaatctatcaagtagaaaaacaatatctcctctctctctctctctctctctctctctaaaaaaagcaatatctcttgatcgatcgattcgagtttgcatatctatttcgttgaaaattccccatgcatttgggatcatgcatatcatcagtattcacgtaactaattaccctttcaccaaaagaactgtccgtcttcgttgaaattttccaatacacatttggagtcatccatatcagtattcgtccgattaactacggttgcaccaaaaaggtcccaactagtttcgatgttcgatctaaccactgaaaacgccacacaaacgaatcctggttaaattggggataagttcagcagtagcaggtacatacgccgatgcgcggcgagtgacgagacgatggccgatcgggtggatcacgcccgcttgtccatcatggacttgaactcgtcgaaggggatgacgccgtctccgcgtacttggccatcatggccttgaactcgtcgaaggagatgacaccgtcgccgtcgctgtccgtggccgcgacgatctccgcgtactcctcggccgtcagatccaccccgccgagcctatgcatcgcgcgccgcagctcctccgccgtgaccacaccgtccccgtcctcgtcgtactagttgaacaccgcctgcagcgcctccgaatccccgtcctccatcactgcgcggagctcctcgatgctgtcctcgtcgtactcgtcgaacaccgcatgcagcgcctccgaatccccgtcctccatcaccgcgcggagctcctcgatgctgaggaacccgtccccgttctgcctatccgccgcggcgaccgtctccttggccttcccgcacccgtagaattcccttatctccgcggccgagaggtgtcgtccgtcgccgtcggtgtcgaagcagcggaagacgcggccgcgctccggctcggtctcccatttccagaacgatggatgaacatccagcctatccgagggcggtggcggcgacaggctacggctacggctacggctgcggcagaggcaaccgcaggagaggacgagacccatggcgagacggatcgtgcgccgcgcgtttccgtaatgatcagtgcgtgggggttttgggggctcttggccgatcggccattggcttcagggtttaggtgctctttaacggttttcctataaatttgtttaacagattttatcctcaaaatcacacgatttttttgggttaaccacgtcatgacgtcacaaccagattatgtgaaaaaaattgataatttaacacttttttcgttgttcaattgctctaatggacacttgtgagaatgacatgtgtgaccatataagcgaatgtaagtgggccatgatgtcaaataataaaaatccattttaaggagtgttaaattatcaaatctctatattatgggtatgtttggagagcttgaaattttgagaaacagttgattggtagctagcttttaaaaatttgtttatggcttctaatttatttttagattatacaactacagatcctcgtaatctgaacaagaagctagatggtgtcgtttgtttcccagatttgtactacatgttttaaccgtacaatgtgcattgagatccgtgctatgtataagtcgcgggtacgctttttaattaaaccagggcactatgtatttaggtgaacaaatttatcatgtaatctactccctccgtttcataatataagagatttagggtgtatatgacactcatattaatataaatctagataggatatgtcacatgacacatcaactaaaaatctcatctcttatattatgggacggagggagtatatagtttgtcggtgacatgggaccgggagtatcatgaatagaggcttgagacagacacaatcgcccacgtggcctggcaccctcggggggcgtcgggcccgagggtgatgtgttcgccctcttctttgtctccccaagggggtcggaccgctcccgcctcggccccgagggccgaggcgccccgacccctcgtgggttttcgctccgcgtgtatgggttaggtgggcacagtggggctcacctaaccacatttattgcggtttggctgagcgtgtcacgccgcatgtaacgcggtgcagtgcactcatttatccggtctgtgaccagtcacagaccggtcagatcgcgggttaggtggcgacaggcgatctgacgcacgcctcgccccatcccgtcaggacgagggcttctaggcactcgtccccagctggagctagcgtgttacctcccagagatggcacgttagtcctggtcagatatatgccaggcttcatcctaaccattacaggcaaaatgttgtgtgaagaagggccaacgtgcagattgctaagctgacgcgtggtggacaagaatgaccgatttgtgaccagtctgacaccggtcatgtcgtcagcagacagccatgattccgcgtcgcgcctgttcccggcgaaagtggaggtaggtgcgggccgtcccatcagaaggtgactcgaacggcaaccatgcaaatctccgtccatttatgaaaaggtagggtaagtccccacagagagggggggatggtgcatgtggtatccccttaagatataaaaggaggaccttgcccactgagagagggggagttttttcttggactggacttttccagattaggaacccagaacaagggagaggctggctcatactttgtagctccttcacacacgaatccaccaaaacacgggagtagggtattacgcttctaagcggcccgaacctgtatacatcgccggcgtcttctgtgcttcctatctcgcgaaccttccacacacagattgggagcttagagtctcacccagggtccccggccgaaccggcaaaggggggccagcgcggtctcccggtgaggagccccacgctccgacatctggcgcgccaggtaggggactctgcgagtgatcttctgagctcttgcactctttcgtgtgcgccaagcttttcctgttcagcctcatggctgagcaagcaaaggcgcacaacctctctccgagtgtgagtggcgacgacggggagccgaacccacgccgtcgagctcgtactccaccgccccctccacgccaaagtcctaagcagggggaggcgctcgagagggccgaaggatccgcgacttcgacatccacaggaggtggaaaggggcggcgagatggggagcatcgcctcctcgtctatggtgacggcagcacgccccagggcgcgctccaagctgcgggcgcgctcctacgtcacccgcccgtcgcccatgacccggagtctccagcccaacgctggctggacgatgtggccaaattggtcatgactgcacggcagtgtatagatgctggtgggcggtcctccgccaccaaggcctctggtgctgctaccaccggctccgcgtcgtcaagacgaagggcgcggcgagcggcagccgccgttcgccattcggccaccactccttcgtcgactccttcggcccggaaagatctgcgagggaggccggacgcccgcaccagcatcgagcggcggcgtaatgaccgacgtgctacccacgcaacggagggcgcttcctcgtccagagtgtcacctcagcacagacgcgggaatcagccctccgtgcccccggttggtggtgtcggctgtagagcctttgtggcgagtcttcggaatgtccgttggcccccaaggttccggcccaccatcgccgaaaaatatgatggcagcgtcaaccccgccgagtttctccaggtcttcacgaccgggattgaggccgccgggggtgacgacagggtcatggcgaatttctttcccatggccctgaaggggcaggcgcggggttggctaatgaacttgccacccgcgtcagtccactcctgggaggatttgtgccaacagttcaccatgaactttcagggcacatatccgcgcccaggtgaagaagcggacttacacgcagtacagcgaagggatgatgagtcacttcgctcgtatattcagcggttctgtcaagtccgcaacaccataccatgcatccctgcacacgcggtaatctacgcgttcaggggaggcgtgcggcacaaccgcatgctcaaaaagatcgcctctaaggagccccagactaccgcggagctttttcagctcgcggaccgagtggctcgcaaggaggaggcatggacctggaacccctccggttccggtgtggcagcttcggccgcccccggatccgccgctcagacagggcggcgtgacaggaggaggaagaagaggtcagcccataccgacgacgagggtcatgtcctcgccgtcgagggcgctccgcgggccacccgaaaggggaggcctgcgagcgacaaaaagaaggaagccgacgctccctgacctcggctacttggaagagcgaaggcggcgcgcggcccttcgagccgcgcgctaccagcagagcctgcggcgctaccatcagcgccacgtccgggcccgatcactctgcgtcgacgacctcgtcctacgccgtgtccaaacgcgtgctggactgagcaaactctcaccaatgtgggcgggtccgtatcgagtgatcggcgtcccccggccgggctccgttcggctggccacgggcgacggcacagagctgcctaacccgtggaacatcgaacaccttcgtcgcttctacccctagtgggggttgggtgtcaggtcttgggctcgggccaactccgcacccccccggcgtgcagggttggccgggggcttatcttttttctcttccgtatttcaataaaagcattttcgatttcctaaaggctgtgtctgtgcttttgtttccttttgaagaatcttgacttgaaataggtcactcgtgctcaatcctaccctcgggggctcgggtcggctaaaatcgccaaaaggggcccagaaccgagccgtgccccgggacgtggtgaactccgggggggaatcggcaaaaacccacaatcgggtcacccataaccctcggtcaccacgctcccggcctggccagtctcgacatgtggatctccccaggcactagccttgacccgcgccgtttgaggctgggacctgggcacgagcccttgttcaagccaagacacagaaggaccgtggcacagaccatcctcgtctcatacacagaacaaatgaaattgacacaaaaatttcctctttatttgatcgcagattaaatcagcctataacaagaagggggcccgaaggcctcggaagaagaaggaaaagctattaagattggcggaggcctgggggctcactccgacgcgcccgggtagccggcctcgccgtcgctgttgtccgcaccgtcgtcaccgcactcctcgtcggagttgaaggcaaacgcgagccgaggggccgctcattattgtcggtcggttttcccttgctgatgcgcgcgatttgcgaccgccgggattctgcccgaagagagagagagagcagggaggagaggcccccgagccgaacggtggcccaaggcccccgacgaccggagcaggccctctgcccgcttgtcagacggtgccaggtgcccccgacccccaggatggccccgaggccactgcgggaaggccgcgcctgtcgccctctgaccccgaggtcgtcggcacagaagccgagtgcgccccgcgtggcctctcggatggagagcgccctggagatgtggcccctgacgaagaagatcggccccgccgaaaggtgcagcggcccgtctacttcgttagcgaggccctccgggacgctgagacccgataccttcaggcccagaagatgctttacgctatcctgataacttcgaggaagttacgccattatttccaggcgcatcgggtcacggtggttacgtcttatcccctcggccaaatcttgtataaccgagagggtactggacgggtggtgaaatgggcaatcgaactctctgaattcgatttgcgctttgaaccaagccacgcgatcaagagccaggccctcgccgactttgtggcggagtggaccccagctcccgagctcgtctccgcccccgaggccagctcgagcccatcgcagctgcctcacaccgccctctgggtgatgtagttcgacggcacctgtaggaaccggccccacctgtcaccaggccttagaagtggcgtcacgcccgaccgcttccctcggggagggcgatcgccctggcataacgccgggggctactgtcggtgacatgggaccgggagtatcatgaatagaggcttgagacagacacaatcgcccacgtggcctggcaccctcggggggcgtcgggcccgagggtgatgtgttcgccctcttctttgtctccccgagggggtcggaccgctcccgcctcggccccgagggccgaggcgccccgacccctcgtgggttttcgctccgcgtgtatgggttaggtgggcacagtggggctcacctaaccacatttattgcggtttggctgagcgtgtcacgccgcatgtaacgcggtgcagtgcactcatttatccggtctgtgaccagtcacagaccggtcagatcgcgggttaggtggcgacaggcgatctgacgcacgcctcgccccatcccgtcaggacgagggcttctaggcactcgtccccagctggagctagcgtgttacctcccagagatggcacgttagtcctggtcagatatatgccaggcttcatcctaaccattacaggcaaaatgttgtgtgaagaagggccaacgtgcagattgctaagctgacgcgtggtggacaagaatgaccgatttgtgaccagtctgacaccggtcatgtcgtcagcagacagccatgattccgcgtcgcgcctgttcccggcgaaagtggaggtaggtgcgggccgtcccatcagaaggtgactcgaacggcaaccatgcaaatctccgtccatttatgaaaaggtagggtaagtccccacagagagggggggatggtgcatgtggtatccccttaagatataaaaggaggaccttgcccactgagagagggggagttttttcttggactggacttttccagattaggaacccagaacaagggagaggctggctcatactttgtagctccttcacacacgaatccaccaaaacacgggagtagggtattacgcttctaagcggcccgaacctgtatacatcgccggcgtcttctgtgcttcctatctcgcgaaccttccacacacagattgggagcttagagtctcacccagggtccccggccgaaccggcaaaggggggccagcgcggtctcccggtgaggagccccacgctccgtcatagttagtccctatattaatttagcaccaaccagagtattaaaggtggtcttcagcgggtccaaacaaaacgggtggggctaattggctagcgtttgcgggctgtgagcctgtgaatgggtcccaacaacctagcaacctattagccccaaatctcctactctctcgctaccttttagtcttcccattgtgccaataaagaaagtcttcttcttatgttgattatgaaatatgccaagagtgacctttcggctttggcggtagagtaggatcaggacgtatggcgatggcatcgacaatggcctctctttggtgaactccctctgctctcccttttgcgcgaggtccaaatccaaatcagctttgattcctcgccttcttcgttgccaccacctggcttgtcggagccaaaaggcatcaacgtgccgccgcagctccgcctgaccagccttctacctatcccctgtgccgccgcagctccgcccgacaagtcttctacccatccctttgtcctttttcctctccttcgaccggtccacgttagaaattgttgtatatggctatctatttagatttgatggggtaactgtaaaatttctaatacagtaactggggcagcagattcactatcaccatcactacattattccttcttctaaaggagtatagatacacatgcttcttttaagaaattgtagaactctcgaaggagtatagacatacatgcttcttttaaacgaagaaattaagaaattatataagtcgagaaaaagaagaactgatttcttttatggtataaaccaaaacatagtaaataccccgacaaagaaattgaggtgtggcacaattttacaacgaaaatttttgattggagaaatacgtgcttctgttctgtgcgtggcctaattggcacacctgaacgcttgatctcgagttggacggccgaagatttccagtaaaaacatgccttgaataggtcagggccagccaaacccggcccaaacctcactttatccgagagcccgtcgtctcttccaggcttcaagccatctccacccccaaccaaccccactgctctgctcttcgcgcgcctccaccgccgaaccccatggccgccgccgccgccgcgggggcgacgccggcgacggcgaggaaggccctgctcacaacaaccgccaccctcctctcctcctcgctcgcgcgcagccggcgcagcctctcctgctccgcggccgctgcctccgccgccccgcgcatcgcgcctcagccgccggacctgctccgatgggtgcagcgggagggagggttcgtgcaccccgccctccgcgtggtcgaccatcctgagcacggcctcggggtctccgccgccgcggccgagggagacattccccctggcgacgtcctcatcgcgctacccggccgcctccctctacgactccgccgccccgccggcgctgcggacgcggtcctcgtgcagctagcggaccaagtacctggtaatggctctcctagtcctggctcagattttcaattacctctgttagtcacgttgtggaaaccagtgtggtagattcatgtttgtgaagagttgctaatgcatcaaaagtaagatctatttctatataagaatcaggagcataattggtattgattctgctgttgacgtcggatcaattgaactgacatcctcctagtattgcgttttagttcagtagcaattttttcgccagcgcgcaaaagctttgcacgccaatatattagagttcagtagcagttgggttttacaattttgagaaatgcggttgtcctgaacacctaatgtctaatggcgaatgctgttttctcgtgttaaattgagtaagattgagtcaggttttcctataatttacgctacacaacctaatcctttgtgtagctaatgttgtattttgacataattgctgcacgatggaactattctacatgtgcactctatgatcctgccctcttttagtgtatgagggactttacattctagaaaattaggctaagtacccttcagtgactaacaaattcaatcctgcgggaagcatgtgacagaggaactatgggctatgcgactgggcttgaggctgcttcaagaaagggcaaaatctgattctttctggtggccatatatcgcaaatctgccagagacttttactgtaccgatattttttccaggggaagacataaaaaacttgcagtatgcccctcttctccaccaggttgttataaattattgtagttcttattgcatttcccctcttcttttttgacttattatatttcaggtgaataaaaggtgtcgcttccttctcgagtttgaaaaagaagtgaaacataagcttggtacagtgcccttggaagatcatcctttttgtggacaagatgtaaactcatcttcccttggatgggctatgtcagcagcatctactcgggcattccgtttgcatggtgaaatcccaatgctgttgcctcttattgatatgtgtaaccatagttttaacccaaatgctaggattgtccaggaaggaaatgtggatagccctgatatgtcagttaaggcaagtatcctgaattgtttgtgtacttctgagcccaagaaattttgtatttccttaagacaatttttgttaattgaatgccctctgttagtagctttgtttatgcataacagcataagtgacatgtgaatgcatttatttaactgaattcatggataaatgtagccttttatgttatcttaccatagatgcaagtaactctgaccaccttgaccttgcttataggttgttgctgagacaaaaattgatcaaaatgctgcggtaacactgaactatggttgctaccctaatgatttcttccttcttgattatggatttgtaataacatcaaattcgtatgatcaagtggaactgagctatgatggaactctcctagatgctgctagcatggcagcaggagtttcttcgcctaacttttcagctccagccaagtggcaacaggatatcttgtcacagctaaatctgtatggagagggtgctattctaaaggttttgcacacattcttactgatcctatttattttttgcaatctattgttgaattcaagtcgtccagtatccatgcagcaatctgaaccttcttggttttctgtgggtatcacttgtaatttcttttcaggtcagcataggaggtccagaaatagtagatgggcgcttattggctgctttaagggttattattgcagctgatccggacgctgtgagtggccatgacctcaagactttgatgtctcttaaggagaaagctccattaggcccagctgttgaagcttcagcactccgaactgtccttgcactttgcacctttgctctacaacacttccacacgaagataatggaagacgaggccatactaaaaggagaaccacctcttactactgaactagccgtgcagtttagattgcagaagaagctgcttctcctggatgtgatacagaatcttagtcgcagaatcaagatgctagctctagacaaatccaccgtgtaggatttttcacgttttggaattgctttctcggacaatcaattaccctattgtactgattctggagatgacaataaagccccaaattttgtcctgttttcttcattgtccagatgccagagtccaatatggcacggatggttaacaatcagattgaattgatcgcaaattataatcaagtattcgttgccagttgcatgtgctctaaaatctaaattatatgtttttcactgtaaaagtatgttttctttagacaaaccggttcatcggagagaggaagatcatcaagaatgaatgcatcacagatgcacaattcaaaatagctaggctacataactttagtatttacagaaccaagatataactttccattaatcctaagaactgaaatttccttgtctcaacgacaacgacgacgacaataaaataaaaagattaatgtacgcagtacagccaaagaatgatcctaaaaaaacatctgctcatgttcggctgctcaatcagtcgggtctaaccatgacgagagaagaaaactcaaggagatcgcggcggcgcccgtacgtctccatccaatccggcaatggggtggcgcacgtacgtacgcctcacgagtcgccgccgatggagatcgccgggcgggcggccctcccgagcggcgagcgggagcgctgcctcgcctccatgtcccggagcaccaccatccgccgcatctccgacacctggtgctggtacgtctcgtccaccttcaccttctccccctcctcctgcttgatccgcctcacctggctgtgcaccaccaccagccgcctctgctgctgccctgcatccacgtccctacccatctccatctcagcgaaaacctccctcggcttcctccccctcttgatttttttttattctgtctacagagacgatggcgatcacgcgacgaggcgaatccagaccattcgaacggtgcgttgcatgagaggggcgtataaatagcggccgcatcgcgggtgtggatggatggatgggatcaggggactgaccggttcccccctctcatccgcgccgttattgcggaggcaggcgcagcagctatacacacgtgtcctgctatcccgagcggtttagacgtttacccgatcgattggtcgccgtctcggcgccaattcaccacgtacgccgatcctccatgtgtacggggttgacgtcgcgaggccgccgagtcgtgccggtctgtccattatccagagtttccggacgggatggacgtttgccgatacgattttgacattttctttcttttttctgcatgatttgtaacgatgtttgataaactatgcgtgtcatatccttttctatccgaggtaaacgcgtcgtgccagttgttgcaaaagatatataaacgcgtcggtttaattacgtgatatggagccgatagggactcgtcgcacaacgaagcgatcgcaagtggcaaccgcgcgagagaaacgtgtgggaattggaacagagagtcagagcctatggcaagctgggttgatatccggcagtacgtttaggacaatgtttaagtcaaacattaggaatataaattataaagtttaaaaatataaaaattatatgtatagatttgtcttgaaaaattctttcataaaagtatacatatatcacttttcaataaatatttttatagaaacaagaagtcaaagttgtgttttaaaaacggtgtcgctattgtaaacgacttcctttacgagcatggagcgagtacgttgcaacgcgattgaacatcgtcgtctacagctcacttcgccgagtccccggcccatcgagaggatgcatttaattctgttatttgttatttttctcaaacgagggtaaaggtgatctgagttaatctcagatccccgaaagccgggatatctttatttatttatttatttcaatggagagtaaggcggttggagttttgatctccgatattcatcgatcgtatagtcatatttacgtactgcaaagcgatcgagtgcaacggtcagagttttcatctccgacctccctggagatcgagtccctatcgatcgcatctggtgatcggatcgaaatctcgcgcgaaaccaggcgcctacgtaacggtgcaaaacataccgtccatcggtctacagctcgcctagccgagtcgccgaggcttttcggccgagcctcaatcgagggcaaggggattcggagattaaaactccggtttccgaaccaccaggaaagataagatgattgaatcgatgtcttgcgccggaattaccaacggatgcaccaatcctccttctagagaggattctacgctcagagacaagtcgctaaccatgtcgtgcactggcgcaggtagattttcgattttctcgttgcttgggtcacagtgatatataccaactacctggtagaaccagaagccggctacggggtttcaaaaaggaagaaaataaaacgtgaaatctatttcgagagcgctctcggtttagctctatagcgtgacgcatctcatagccgtctaactgtgcacgtcgtcatgatgtccacccatgtgggtgtctttttcttttcaaataaagttctcgtgggtatctttttcctattcaaataaagtttcctctcaaattacttatccgatctacaatccgattacaccattgtgttcgttacaattaaatcttcacaaacaagatcttacatgattatgttacgttgaaaaaatatttatatttataaattacttttattatatacataagttacttttatcatatatataagttatttttagatttgactaaattacttcttagacatataaaagtaaattcaataaagtctaaaagtaatttacatatattctaaaagtaacttaaaataaaacagaagtaactttgtcacgacattagaagtaaattcgttgtaggggataaaatatgactttttagttaattccataatttgtgctgattaatttaatttatagatagagtcatgtttttatctctacaacagatttacttcaaatgacatgccaaagttaccttcattttgttctaagttacttctataatatatgtaaattacttttagacttactgaatttacttttatagtttaagaagtaacttaatgaaatctaaaagtaatttaaacatatcataaaagtaatttgtgatttttcatcaaaatataatcatgtgagatattattgtaaatatttaattgcaacgaacacaacgacgtaatcggattataaatcggataagtaatttaagagaaacttctctaagaagaaaaaaaatacatagatattgagtgtactagcttttttttttttggaaaggagggtgtcactccttagcactatccaactagcactctcggtgtagttaaaatagaatctggcctgctactacgactgcaagtttatgatcgactggcgatcaatactcacacgcacagagaagccgcagaccgcacattcactcaaagtgtgtgcaaaacgtgcatgtttaggattcgcttttggccagcgaatgtgcaagctttgattcatcatatttacgtactgcaagcaaatactccatttggtcaggattcgctgcaggacggccgcgcggcacacggctgacacgagcgcacgctgcgcgagcggcgaacgtgcagaaaacaccgttcaatcgatgcgcccggccacgcgatggccaggcgtatgacacgcacacgctcgtgacagcgcgagatatcatcatatcaagcggccgaactgccaaaataccgtactccaacacgagatgatttcaatctctccccgctccgctaatcgtttgcataccgagattaaaaaactccgacccccggtatgtgtggccgaagttctcttttgtaaattgtaattaggagtattttggtaagggatgcaatgggatgtgagttttaatctcggatcctcgggagcggaatttcgtttgtcacttttttcaagcgagggcaaaaggagaggccagaattttttgtagggaggcgagggggttcggactccggagtattgttccccgaactccatggatcgcatcggatggtcggattgacacctcgcacggtcgcacctaccgcgcgcggaatcaccacttgacggcttcaccccacgccactccttaaccagcgagcgtatcggatggccactccttcaccagtcagccgtgctcacacacgactgacacgagcggcgaatgtgcaaaaaaaaaaaaaaagaccgtggaatcgacgtgcccggccatgcgagtactcggtgtgtatagcccattcgtgacactacgagtacgagatatcaaaccagccgaactgccgcaaatacctaacacgtatgggtacggcaatacgaatccctgcaaacgcgacgttcgatcgtatcgtatgtacggtgtgcttcagagttcagaagagctcgcgaggcagctgcgtcgtgcatttgtccattgtctctggacgggatggacgtgtgtttgcggcttgcagatacgatttggcattttttgcgcatttggtagcgatgtttgataagctatggattagcataactgtgcatgatttggtagcgatgtttgataagctatgaatatatatgtgcgtggcattcatttctacgcaaggaaaacgtgtcgtgccggtttttacacgggataaacgcgtcaacttaattacttagcactcgtatgtgatatgtggccgacagggactcctgaagaaacgaaccaatggcaagtggcaaccgcacgagagaaacgtgtggaattgggacagagacacacacggagccatggcaagctggatcgatctctaattgcagtttccggtaaatcacgaaattaaagcccatgggcttagctcgtttagagcaccacgagcagaaacggacgggctttaaggccgataggcccggctgaatgctacgttgcgactactaccattcacagagccgagtctccatcgagctagtttttagttattttagttatttttacaaacgagggtacggtggtttaggggctgttcaggttgatgtcatttttaaccatattatttttgacataattgttaaaaatatatctacgtttagtttgttgtcaaactttgataaatatataagaaatcctgccaaaatttgtaaggtttattttagctacaatctaaacagttacttaatcttcaatccacgaaagccagaatttctattgttaattttcgatctagagaaaggcggttggagttggcctggtttattaattacgtacatcgagagagggcacaagtcggagttttcgggtctattcattttgatgtcattttcagccatactattttttttataaagttgtaaaaaaatatctacgtttaatttgttaccaaatttggtaaatacataagaaatcttgctaaaattttagcaatattaccatcttgccaaaattttagcattgccaaaatttggtaagatttattttgactacaatatgaacatgccattcatctcccccattcatctccgaacccccccccccgggagatggagtccccatggatcacatctggatctggtcatcggatcgaagccttgcacggaaccaggcgagccacgcagaatgcatacgtgaaacgtaccgatccagcggtctacaggattacaactcgcccatacgatcgaggccaaggggttcggagataaaggggcgttttggtttgatatcaaaatattgccatactaatttttttagtttaaatagtaaatgtgatgatttggtttgaagccaaatatttggtaatgcctatactcagtttgtcacaattctagaatattcttcaaaacaatttaaaattggctctcaattggcataaatctaaagacacccatttacaattctaccctaccaaaatattggtagtgctaaaacttgcctagggttcggcactaccaacatattggtagggtgctaaaccaaacaaacccaaaaactccgaaccctaggacggatgattgaatcgaggccttgtgcagaatcatccctgcgagccgatcggattggatcccccacctttctggagaggattctacgcgcagtcaacacacacaagtcgctggccatgtcgtgcactggcggaggtatattttcgatgcttggccgacagtgatacaggcataaagcctaccaggctactagcgctgcaagtttgtgatcgaataatgacgagtactcacgtgtacagagaaggcgcacagcgcagtactcaactcaaattgtgtgcaaaacgtgcttgttctactaccaatactcaccgaatcaaagttttaaaacaaatactcaccgaatggcacgttgaatcgagaggatgcggacctccacgtcgccctctcgcgcgggcggcacggagggcaaaccctagcccccgccgccccctcccttcctctcccacccctcgccgccgccggagcgcgccgacagagttccgcgcggccagtcgtgagggcggcggcgaggcctttccccggcgacgcgacggctcagcacgaggacgacgacgcggcgcgcgatgggcgggcgacggcgacggcgcggcgcgaagtttcggatccggcagtgccgccaccggatctggcacccccgtggctggattcggcgccctgccgctggacctggccggaggcgagcgtcattgccgtccgcggcggtgtgacggggcgcggagtaagtggggcggcggtgcatgtgctggcggccagcggggtggaggccggagtggatccgggacctagcggtcggatctggcgttgtcgcctcgtcgcgtggcgcggtggacggcggtggcaggagagcggcgctgcgtcgaagcggccccggcgccgagggcgggttccggccgacatgtgcctagggcggcgtgcgacgcaaggacggtaacggtggtcggtggcccagccctcggtcgaggctcaggggcctgcgtgcctccggagatgccttggccggtggtgcgacgacttggcggtgcgtcctgtgggtgccgtcgccaccgcaccctcgtcttcctcttcccctccccctagtatcctcgtttgtctagtatcctcgtttgtgtgccctcttccccctagttccaaacatcactagtgatcttgcccttcaacttcttctcaatctagcgtgcttgtttggaaattgtgctcctctagtagctcggattgttgcggttctatgccctcctccaaagttgccgttgatgtccttcctctgtaagaatccccttggccatttctccttctgtctagcccctgctcgtctacaccctcttcctcgagatgtccaggaccgcaaggatcagtgtttctccctcctttgaggcttccttcccttgaatagcgttggagagagttgatctaacaagcaacttgataaagcctgattaaagaagacttaatgcgggtggcctcgagccacaaccttcagtggccctccctcctttggggcttccttcccccaaagggcgttggcgagctctgatccaaacagcaacaagatcaagtcagcttctggatagcttcatgcgggtggccttggacttcaacagcattcccttggcctctcttctcttccgacatgcttgtggctgtgtgaggaattggatgttgattagttggggtttagcagtaggtttggaatttggcaagataattttgcatgtgtcgttcatcaattgtaatctttaggaggttttttttctctgttctctcctcattgtattctccatgtattctgttctactatcctccagggtcactgcgcttgcgtaggtaaagcttgccctgtgtaagatcatttggctcaatatatttaggtggggattctctccccccgtgatttagtaaaaaaaaaaaatactcaccgaatctcttagcttttcggagaggatttgctgccggtcgccgctacctcgtggcggtgacatggactggagtcactggacggccgcgcggcacacaagcgcacgcgcgccgcgagcggcgaccgtgcaaaagagaaaaaaaaacaccattcaatcgccagacgtataacatgcacgcacacgctcgtgacacggtgagacgatatcatcaacatcaagcacccgaactgccgaaatactgtacctaacacgagattattttttaatctccctctgcgcagctaatcgtagcacgtatctaactatgcatggtttgcataccgagattaaaggaaatggctatacatgttacccgtgccatgtgtacaacctgcattcgactaacatgcacaagcataacttttgcttgcgtggtcctacatagagagaaaccgatcatggtgattggtggacgtagcatggttggacgcatgttgtatacaacacagttgtacgaacagcaggactgcaggagttgagattaaaactccgacccgcaaaggctgatcgaattttattttttttttgccgttaggagtattttggcaagcgagacaaggggatgtgttctcaaaaaagacaaggggatgtgagttttaatctcggatcctcaggagcggaatttcgtttgctatttctttaagggaagaggcattcataggcgtccagaacattttgtcgttccgtttttcattgtttcaagctgatgcaagggggttgggagttttattgtccgacccccaagcccaagggatcgcatcggagtcggacagacggatcggcacctccaccagcaggctgcgcgcggcgattgtgcaaaaaacaccgcggaatccacgagccccggccagccatgcgagtatgtgacagccaagcgtatagcccagtgacacgacgagatatcaaacagccgaactgccgagttaccaaacacggaaacacgaatcactgcaaatatggtgtcctaattcataagagctcgcttaattggaacctttttctggtcgccttttcccagccgaattttgactcgcagctcatatacgccttttcaggctacgtagaaagagtggaagactgcttccgacgtactagtagcagacaaaagaacggcgtattagagtactcacaatgtctgatcaggcagagctttcagggttcaactattcggaaactggatagccaaagcccaaaacacaggtccacggcaagctactggccacactggcaagcgaatcagcgattggctacagctctctgctcggcatataggccggcctagctagtggcacacaaaagcgggccgcactggtcaagacatttctccagagactgaccgtacgtcgtcgtcgacgccgtcgccaatatttgattggtgaccggtcctgcttggcaaccttgtacgtaagggtgtaagtgggtaggcttatgaacccatttctaatataaataaacaggtaactcatcgattatccgtttatttgtactataagtaaatttatagatttattcgcttgcacacttacctgtaacatcgatccatattcttgatcgttcggatgcattcatttaccactgcagtagaagtttgtatacttcctccgccttaaaatattatgaatttactacgagtctgtattggaagatgcattatattcatttaaaattctttacattttagaacgcataaagtactttgtagtacgtggctatagaagagggccttgtccacatcgcgaggacccgttcatcccaggcatgctggtgatgacaacgaaatcatcccgatctctctcgactcctccggtcctcccccgataataatcaacaagattatattttactccctccgtctcgaaatatttggcgccgttgacttttttaaacatgtttgaccgttcgtcttattaaaaaatttaagtaattattaattctttttctatcatttgattcattgttcaatatactactattattcaagtttttgaataagacgaatggtcaaacatgtttaaaaaaagtcaattgcgccaaatatttagggacagaagggagtagttctgaaatgaaaaacattactcccattttaccctaccctctagaattgtctgccatagaatgttgttcagctacacaataaaacgatcaatgtccatccgcccggtgctactgcacggtagagtacttcagcaacccaatgtccactcggtatgatcttcatctagaaggaactgaatagaggcgcggctgagcttcttatatcctatgctttgtctctcataactgatataagccgtaaacggtttatcaacaactaaaaaattaatctatacataaatgttttatatattggcgtgttcggatgagagttttgcagcagcgttgcggctgcagaatggctgcagcttgcagcgattttcaactgccgcaggcaatgggtgccaaacactcaccatgtatccttatcgatttaaaaacagatactaagaatagactatgattaaaaaaatctcaaatcaaaataaagaattaagtttcaaatttaaattttgatggcaacttataagctgaaacacacacacaaaaaaaagtagacatgtagcaacacacaactgttgaacgaacaacactgctaccataggtgccggttcctaatggcccataggtccggattttcatccgacatcaattagtcggcaccaataataacaaccgacatctataacgaaaatagaaccgggacctttaccattgctcgagccagagagagagagagagagagagccggctcgaattcgagaagaactcaccaagcgccgtcaccgggcatgcgccccaaaccccaaaatcatccacaaatcatcaacaaaataaattgaatcacataatgaacatattcaacaacaaattcacacagacatcaacaaaaaatctacaatagactggggagaggcgtagaggggagggcgccaccgctgcccgccacctgtcgcctcccctcccgccggatccagcgaaggggagggcgccgtcgcaacccatcagctgtgtcacaccctgaagtttcccccccttttcttgctttaaaaattggttaaataaattgcccgaagaaattatcttcattaacctagagctaaatccctagttaataaatgcaattaataatcagaaatagcgtggtggaatttttcttgagttccccatgctccaatgcattaacaagatttttagtggaattttcagagccttggaaataattttaaccaattaaaaatcaccaaagtgcaattttaaatcccaggaaaaatcctttcttctttttctttttcttttccttcttttttctctattgggccgtcggcccactccctaccgcgctcggcctccttcctttgggccggcccgttcccctttcccctctctccgggacgctgacaggtggggcccacctgtcaagtcgtccccttcctccagccgcctaccccacgacggcaaccgtcgccgaaaccgtccgcgccgccgccttctccgctccacgccgcgcccccactccgcgtccccacgtcgccgccctccccgccattcccgcccgcacgcgcgcccgcaaatgggcgggattcgatttgaatcccccccactctctctctctccccccacgtcgccggccaaatcggggggtttcccggccatgtccacccctctcgagcccctataaagcttccccgcatctccctctcccttttccccttttcgccgcgctctcccgtgcctcctaccgccgccgcttccggtcacgcgccgcagccgctagagccgccgccgcgccaagccgccgccgccattagcattgccgccgcgtgagccacctcggccgccgttcggtttccgctaaaccccaccggagcccagttctcctcgcacaccggtgagctatccattctccttcgtctccggccaacaatggtggccgccgtggtcaccctctctactcctaatccttctcaactccctccgtaggtgccgccgccgcccgtccgcccctccttatcgccaggtcatcgccgccaccttcatcctccgctccggccgccatactcgccggtgaggatcccccctccctcttcccctctctctcgtttgcgccgactttctccacgagctcgccgtcgccttcggtcgacgccgccgtcctttaccctgtccgccgtcgcttcttgcgccgccgattgccgtcgccggcgaccgtgcgcgtcgccgccggttgccatggccggccggccggttttgaagccgtgccgagccgtgcctagctgccgccgtgccgtccgatcggcctcccggccgatccggaccgtcggtcccgtggaccggcggtggaccacccgcgtggtcccggtccacggtagaccggccaccttgagccactgcccgtggggcccacatgccggcgcccccttcctctcccctttgagccgctgacccgtgggccccgcctgtcggcgccgcccccctagatgacgtcagccctgggtattattgcgcaataattaattaaggactttttctttattagtaaaaacacagtttatcttctaaaattcataaataattcatccgagctccgtttaagtccattcaagtctcagtaaatcaagaaaaatgcaaagaatccattaaaaatggttttgtttcctgtttcagtagtcttatagcatgtttttcttgtgtgctttgtttgtcgcgtttcggccgtttcgtcgatccgcggtttctcgaagacgttgctgaggtctcatcagttcgagagcaaggcaagtcatgcaatacgtttgatcatattgtacccaatttaccaatatcccgcatttctattaaatgttgcattcttttacaatgtaatgtgggatgagtcctattcctcagccacatattggttaccttatgccattgataacttgggtatcaaaatgactagatgttggcttaggaaatgcttagccatgcttagttcaactagtacacaaatggagatcacattattacatagactctaactattggcatagctttagattggtgccaccgcaagggtgtcagttaattaaaatattctgaatggcgggctgtgagtgcatggttttgctggtcgcacctatggcagttaaggaccggttcacgggaaaccctgggagacttaccgtgcttaccacaagcgggaatgggtaactgcttgatctgaagtatagctcgaccctttcctaggcaccggtggcgagggtgggcgtgatggaattgggtcggccgaggtgttcggttgtccagctgccgtattcaccgcggcgcaagaggggaccgcccactgccttttgaggggtgggggtgaaaccttagcgtggtgtggatggttaggggagggttatgtggagggtcttgtcatgatttccccctttgcagtatcatggtgatacttcggggcatggcaacatgtgtggaatcgtgtcttgtgggtacagttgtacacctctggccagagtaaaactattcgaatagccgtgcccgcggttatgggcgatcaaccagattcaccgtgattagtctcacccctagtttagcttaatgaactggtgtagttcaggtggatggttgggcctgttgcaacgtggtgtagcgttggacagtgattggttaatattgattaattactacagctgttttactgctttcaactactgctttgaaatgcctgctttatgcaaaagaacccctagcttcctttggttatatcctgcatcatacctcctcttccggtatgacttgctgagtacagtgggtagtactcaatcttgctctcttttcccccacaccagagttgaagttcttctcagttggagccgtctcagaggttggttttgttgctgccgtcaaggtttgcctgtggagtggagtcgcccgctgctgaagtcaagcttcccggtttagctcgcttttatctttcccgctgcatttgtaatcttttatatttttgtaagacgtgggtctgtatatcaacaattgtcgtttgtgtaccctggctggtcctggacagggatttaatgcacattcagcttagaaattctggtgtgacaagctgccgcctgccgcctcccctcccgctagatccggcggaggggagggcaccgccgccgcccgccgcctgccgcctcccctcccgccggatccagcagaggggaggccgccgccgcccctctagccacagccacacgctgagagatgtgagagagccgagagagagagggggggcaagagagagagacagacgagagatgtaacgccccgattttcgttcgggaataaaaatcaattaataatacattttctagaaattaaataaaagttaaatcaacttaatcaagtgaattattgagggaattaaaaatttcctttaaaaattattggccgggaatattttgtaatattctttgtgccctaatgtactctccgaaattttccgtgaattttcggagctcgagaaatagttttaatagcacaaagatcattgcatcaattaaaataaaaagaaaacaaataaaatcctccttcctctctttgggcccctttcggcccaatccctcctttctctccgcggcccgcgcgccccctttctctccctctcgggccggcctcctccctcggcccgctcggctctctctctccctcaagtctgttctgcctccccagccggcctctccctccctctctcttcgacaggtgggacccgtggaccccacctgtcatccctttcttccagctccaactgccgccatggccgcctgagccaccccacgacgccgcttcctccgcgcgcctccacgctcccgcgcgcgtgcagacgtggtccaccccacgtcctccccttcctccactttctcccccatttcccccccaaaaatcggcgccgttcgagccccactcgcccacgtcgccggagctccatccgccggccgttgccgcccgccatggccacgatctccccctccggggcctataaaaatgcaccccgacctcccctcatccgtttccccaactcactgccccctcctgcgcgctctctcgagctccccacgccactcccgtgtgccgccgcacgccgacgaccctccagccgcgcgccgtcgccgcttccgtcgcccccgcactgcgccgctgccacctatagcattgcagcgtcccaccgcaccccggcatccgctccatttcccctccccgcctctgaaacaccgtcgccacgcgcaccacctctctccaccgtctttaccacctccagccgccgcttggcgccgctcctaaccaccccaagcagcgccgccgccgccgctcgcttcgcagcgccgaggagcacctcggccgccgcttttcacggccaggatcccgccgggacacggttcccctcgcgccggtgagcatctgccgcccgttctcacctccgaccagcgattcatgccgctgggaggcctctttccccctcctaacctctcccccatcctccctaggtccttccagccgccgtccgctggttcccgctcgcggaacgccgccgggccgccgttccgccttcgtcccgaggagcgccgacgccgagctccccgcctttccccgccccttgtcgccgcgtccttggtgagctcctcctctccctcctctgtctcccgtgcgcgctgccgcgccggtggccgcctgtcacgcccagaaattcccgagtagaattccaagtagaatgtgcattaaaatccccatccaggaccggccggggtacacaaacgacaatgttgacattcagatccacgtcttacaaacatcataaaagtcttacacaaatgcagcggaagaaaagaaagacgacaggagctacgccttgactagaactgcagcgggaacaccactccacaggcatcctcgacggcacggacgaagcctactcctcggagaaaccttcatctgacacactctcgtactctgggattgggaaaagtagagcaaaactgagtactacccactgtactcagcaagtcataccggaatagaggcatgatgcagggaatcatcaaagaagagctaaagtggttcatttgcataaagcgagcatttataaacagaagttgaaagattaaacagttgtcacatttaattagtattaactatccactgtccaacgttatcccacgttgcaataggcccaaccatccacctaaactatccaaattccaaaagattacactagggtgagactaatcacggtgaatctggttgaccgcccataaccgcgggcacggctattcgaatagttttactctgatcagaggtgtacaactgtacccacaagacacagccccacgacacgttaccgtgcgccgacatgtcaccacgacataccggaaagaggccgtgacaggacccttcgcataaccccctctaaccaagcacaccacacctcaggtttcacccccactcctcgcaaggcagcgggcagtcccctctcgtgcctaggtgaatccggaagcgacagaggccgtcgcagggcccgccccgctccatcacgcccacccttgcctggatgcgtcggctcgaggagagctacactacaagcccagccgttgcccacgctggcttgtggtaagtacgataagttcttccagggcatcccgcgaaccggtccttaactgccatgggtgcgaccagcaaaaccatgcacccacagcccaccatgtgatttattttaattaaccagcatcaaagcggtggcactaatccaacaatctgaacattaataagattttccccattgtgcactagttgaactaagcatggctaagcaatccctagtccaatctctagtcatgttataaccccaagctgacaaagggacatggtacaacaatagcatggctatgacaataggtaaacaccccatagtaacattataaaacaatgcaatatttgaaggaaaaaaatagagcatttgcaatataggatcaacatgttcaagtgacaagcatgacttgccttgctctgctgctggaggaacctcggcgactatttcgaagtacaccggagcgtcggaggaaccggaatctagcgacatacaaggcaaacattgcaaacaggctataagactactgaaacagagaacaaaaccatttttaaaggattctacacaattttcttgatttactgagacttgaatgggcttaaacggagctcggatgaattagttatgaattttagaagattcactgtgtttattactataacaaaaatccttaaatattttattgcgcaatattttcccagggctgacgtcagcacggagggggtgcggcgccgacaagcggggcccactggtcagcggctcaagggagagcggttcaccgtggaccgggaccacgcaggtggtccaccgccggtccacgggaccgacggcccagatcgccctcgggccgatcggacgggcggcgatagaggcggccgccgggctcggcttggcatcaaagccgaccggccggccagggctagcggcggcggcacgcgcgcgtcgcgttgccggcgacggcatccggcggcggggcgacggcgcaaaagcgacgcgaaagcggcggcagcggacggcggcaacgaccgaaggtgacggcgagcgcgagcggcagcgacgcacggggaaatggggaagaaaaggaaaggggagggagtcctcaccggaggggacggcggcgtccggcaacgaggagcgacggagggaggtcgacacgcggcggacggcgaccgggacgacctaaagagcgaaaagaaagaggttagagaggaagagaggggccataggagacgggaatgccggccgaaagcggcggacatggcgaccctcaccgacgcacgatgggaatggcgctccggcgacgaacctcgacgaaggaggggtggacggggtggatctcggccccgcgaacccgacggcggcgacggcgcggtgcggcggcgagcctagcggcggctaacggcggccggagtagcggagacggcggcggcgagtggttgcacggcgcgggagcgatggggagcacgagggagttcggcgaaatggggaaaaagcgagagggagcgatggagaagcttaaataggggaggggagggccggacgtggccgggagaggtggggcttcgccggccaacgtgggaagtgggggaggagagagaggcgggattcgaaaatcgaatcccggccatctcgggcgcgggcgcgggcgcgagagagaggggagtgggcgcgggagatgcggcacacgcgcggacgtggctgacgtgacccggagaaggcggaggcgtgggcgcggcggcggttgcgggcgcggcggcgccggctggaggaaggggacgagtccgacaggtggggcccacttgtcggcgtcccggggagagagggaggggcggcttgggccggcccacgaggaggagggcgcgtgcggcggggttggggaaggacccgacaggtgggccccacctgtcggcgaccccggaagaggaggaaggcggggcggcctggctgggcctcggcctgcggccggcccagcagggaggagggggaggaaaggagagaatgggccagcggcccattcgaaaaaaggagggaaaaagaaaaagaaaaaggagaaaaggttttttcctggaattaaaatattgcttgctcaattttaattggttaaaattatttctagggctctgaaaattccactaaaaatcctgttagagaatttcgacatgtagaactcaagaaaaattccacatgccaattccgattattatttgcattgatttaaaagggtttactcttgctttgcaccggtattttcttagggtcatttataaattaaatttaggcttgggaggagaacttcggggtgtgacaccgccgccggcgaccacctggccgtgcgccgccgccccgctcgcctgggccgcccggaccccccttgtcgcgccgcgtcgatctcgtgcgccgccgccgcccatgcgtgccgcctctcccgcgccgcccgtcggtcgccgtcgccggagaccgcgctaccgccgcgccatggctcagctaggccggctttgtgccgtgctgtgccccagccgcgccgcccctggccgcccgatcggcttgggccgatccggaccgtcggttcccgtggaccggtggtggaccggcgcccttgtgccgctgaccggtggggcccgcttgccggcgccgcccctccccctttgatgacgtcagcaaccgtcttttcctttggaaaaataaataataattgcgtcataattcgttaataattctagaaatccatttaaatggctcaaaacttctaaaattcatatctaattcattcgaactccgaattgagccgttcaacttgcaaaattcatctaaaattgagctctacatgtttgtttagtttttatgtactgtttccttggtttttattagagtttttcctcgttttgcgtgccagcgtgtagttcccgtcgtttcggaagatcgcgttcgcaaggataagagttcagaagatccaagtgaagaagcaaggcaagtcacacattccctttgagcatgttgatcccaatttataaatgttttaccgtttacaaataaatatgcatgttttgctaattacatgggatccgggtattacctatctgctcgcttgtgccatgtttacttgatatctgttctttgtcaaccttagataatgaatcgactagctcatgttacttatgtgacctagctagaactatatgcttagccatgcttaattaccactagctcagttgatgggataattacagtattagacctttttagtatcagagtgagctgcgtgctcgagacatctggccatgcttcatggtcgtaattatccaactaaaatgcgactgaatggtgggctgtggctgcatggttttgctggtcgcacccatggcagttaaggaccggttcgcgggatgccttggaagaacttatcgtacttaccacaagccagcgtgggcaacggctgggcttgtagtgtagctttcctctagtcgacgcatccaggcaagggtgggcgtgatggagcggggcgggccctgcgacggcctctgtcgcttccggattcacctaggcacgagaggggactgcctgttgcccgctggggacgggggtgaaacctgaggtgtggtgtgcttggctagagggggttatgcgaagggtcctgtcacggcctctttccggtatgtcgtggtggcatgtcggcgcacggaaacgtgtcgtggggctgtgtcttgtgggtacagttgtacagctctgataagagtaaagctattcgaatagccgtgcccgcggttatgggcggtcgaccagattcaccgtgattagtcccatcttaataaatcgacccaatacactgtagttcaggtgggttggttgggcctgttcaacgtggtgtagcgttgatcagtggagatttaatgttactttaattactcaacagttttactgttttgctcaataaaatgttttataaccgcctttatgcaaatagccacaaaccatccttgtatccccttgcacatctgcatcgttggtgtggcttgctgagtacggtggttgtactcagtcttgcttttattcccccttttcagaagtgtagtacttctgagctgaagacgaagttagaggaccaaggctcagaccccagttgagttttgcctgtggagtggagctgaagccccgctaggatcgcctttttccgctgctgctgctttcgtttcggtgcgaggactaagtgcctcttttgtaagtattttacgctttatttacgtttggaactgtatattacttgtcgttttgtgtaccctggctggtcctggacaaggatttaatacacaaaatagtctggagatttgggctaaatttctgggcgtgacaagagagatggagaggggataaggttcactcatataggggataaggccgatgcgtcggcctagattggctcggcagctcggctcagtttggataggtgccggtttttttaaaaaaactgatacctaggtgcctttttaattaaccgacacctttaatatattaaaggtgctaggttttaaaaaaccggcacctatactatagatgtcggtttttctttagaaccgacacatatagttgcttaaatgtgtcggttttatgtgttttcagcctgtggaggaggtaaaatcactataggtacatgttttagttgttcccgtacctatagtgctgatttttatggatttttttttagtagtacaccgtcatgacttttgcaatgcatgataataataccacaccgtttctagctaccaaacggctccaaagaataggtcacattgtcatcgccggaaatattctccaaccgagatgctctaaccagtaacaagtaatcaagaaccacctgctaccaaggctaccagcgggctcgtagcatctagtactcccttagaggggatattaaagataatataaaagagctgaaagagttactccctctgtccaaaaaaaaaaagttaaatctaaaactagatgtgacacattataatacaacgaatctgtacagaggtatgtctagattcatagtactaggatgtgaggatgtgtcacatccagtactagattggttttttatgggacggagggagtacatattaaatttatgtttagatggaggagagagaggacagaagaaagaagaatgtgctacaaatttataatcatgcaccggtagcacgggctataataaactatgtgagatatagagataggccagttattagtggagtggtgtgtatgtgtgatagagaaacgctcacgggtcttccggctagctccacaattaagatggtgggctaaccggcctaggtttaaagtctcacccgttctatttatttgagattatattatgtcattccttaatattcgtgttctttttgtgtgtatgtgtgataggccagttattaatggagtggtgtgtgtgcgcgcacgcgtgcatacactacttttgagcatgctcttgctctctctaacccaaaatacgaaggtttttaaatttttgcacggcgattaagaaatatgtgttaaatatagaaaatttttgattggttgagataaaaaaataagtgaaaaggagagatggttgtggttgattgagatgatagagtagggtcttaagaaaagagatgatagagtaggtggagtactatattataggataatttcgaatgctactccctacattctaaaatatagttatcgatagtgtcccaattatgtcttgaactatagttatttctccatataccttcttatctaaactaatcacaatatctcccatgtttaatcctccgtctattctcttttctcattcacaacaatcttctatttaattatagctattttcgtagtacatctgtctaactctaaaaatgattatattttaaatataatagagtacaagttaatatattaatatattttgagattgagatagtactttaactcgaatcagtggtttagatttagcaatgttgaaataatcagcaatgctgaaatattcgaagagctaaacgtcaggtgaggctagtcaaaacgatatatgatttgattagtgtttatatatatatcatcaagcatgatccatcacatgcattgcgtacttactccccttaactatacttttttctgcagggtactcctcttaactatatgatacacattctaccggactctgaagtcgtcagagaagaataatcaagcctcaccttccaagtaatacacatgctcagttaagatatcagatcggtgtctgactatcttgagacccccaagcaaatcatttgacaaaccggccaatcggtcagtcgacgatcggcagtgcatgttactccccggatcttacaatattaattgcacatgtccacgtcgaccgcggatgcaatcaaccaaatttgtcaaaaatatatattgctccatcggttgatcgaccgaatagtaaatcacgtcctgtcgtcgattatttatctattgattctgtttcgtcgccaaacaactccatcgactttgattaattagtgtacactatactccttgattctccattaattagtgtttgttaggctaatatatgctgcagtttcttagaaaatcacgagctagaggtagcaggtttctgatcagaagcaggcaagaaactattgaccatatgcagacttacagagcttctctgctgcagttcaagtggttttatgccaaattacatgataatttcgtagctcacgtgcactttaaatcgacctgctgattaagatattagtaagcatggtgtcactgttcaatttaatcatacagggggaatttgatgtagagattaattaagcacttagttgttcataatatgcatggaacatgcattgcagcagaaatattcgagggcatctatcatcgattagaaaatttctttagtcgatggtctgaccgaatctcactaatacgggctgacggttgatgcattattgaggatcataaattcgtacaaataatggacgattatctgcataaactagtttgaaagaaaggcatttttggtggcatctaactgaacgacgggttggctgagattctaactggacagagacgcgtgaaactaaagctttcagtttcacgtagaagacgccattgattttaactgacaaacacgcatcaaatttgcgaaattctgattcgctatgtagtcatttcgtagtcgtaacatagattcaaacgcaggaaagttgagcactttaagcatcctgaccaactacactgatggagcagtacaatttcagtactaagtaggaccgatcagtaaagaagattcagcatggaactgagaccaaacttcaccaaaccgtccggagaatgttcttgacgatgaaacttccggaaaacagagagaaacgaaaagagggcgataaaaatgcgcatggcaacaaaattattttggagcaatgcgtttcacgtcagcatgcaggtgatggaccagtgaacgacttaagggcttaaggctgcacatgaattgctccatggaagactttgaggcatgctgcatgcatgcacttgatcgatcgattggctctccatgcctccatgcacgtctgaagtctgaacgctgcccacgaaatgaacacagtttgtgccatatcaaaatgcagttgcatcagctgcaaattaagcttgcacccatactagctaacaaccagtatggtcgatctgaacccataataacattatccccagcaagatagacataaacgtacacacatgcaggcatgctcgccgcaactgcatacacacggccggcatcgacgccccaaccacccgattagtagcgacacgacgacccacctctgtcgccatcacgaaatcgcattcggtcgatcgaccgctcgcgagtcgcaaaccgacgaaacctgatcatcaaaccgatcgatcgcccgacgatgaggacgttctcgaggcgttattcgaccaaacaggccggagcagcgcagcgcagcgagcgagcgcggggccaagaaaaaaacaaaacggagatatggcagccaccgcgcaaacaggcaaggcggcacggccacgcgcgagccatcaatgcgtgtgcccatgttggtggagacagtgcacgaggcaagtgcgcggcacggcagatgcgcaccgcacgcatcgctggactgacgcgcgcgcgcggcgggacggcgcgcggggccatggcctgtcgagctcggcggttcggcgcggtggtcaccaccacgctcccctcggcggcgcggtggcgagcgatttgtatcggttggtgagcgcgcgcgcgggccgcgggggcgtcaagctcggtcgcggcgttgggttacagcggctggacacggccgtggcggtgtgaccggattggtcccgaacagcgagcaaacgtgctacctgtcactacaggaaaaaaaaaataaaactggcctgttcgacgaaaagtaagtgggttcattgcacgtaggaatagtagtacgtgctgacatagagtcagatccgatttcgtaaaaagaaacctgaattgatcggtacagaaaccaagttgttttcctgattcgatgcatcaaactatagttgcatttttcgacttttcggcgggacaagtatccgtacgtccatcttgcgcagtatgggcagcatgattgggtgaaacttccgtgcgaatcaccacgccgcgggatggtgacgatatcggttggaagaaccaactacaactaaccgtaggttggttggtagtcctggcgactcacactgtccgccaaccagagctagaaataatactaccttttattcgcctttaacaaaacctggttgcaacatagccggaaagcttaaccccggcccggccccttctgtcgtcgtcgttgctgcttcttaatttcgcgtcggcgacaatggcaggaccgacgggatcgtggatgacgatggtgtaataatcactaataacaaaatatccaaagcagcagaattagaccgtcgcaccggtatatccgtgtgaaaacacacgggtacgcacgtaattttcacattctcctggaaacgtggcgatttacagtatatatgtacggcgtttctcatgtggccaaattagcgtgatacgatcggtcgccatgtatttcttgcgccattgctacgtactttactcgtatgtatgtacgtttgtccagattgttaacaagagaacgaaccgtatttaaaccacgtcgtcgtcgccttccataatggaagagatcaaagatggccactgattcaaaaaagggaaaaaaaaaacaagaaaaggacgaggaggagaggcagagacgggcacgacgacgcagtgtgcgtgtgtgaacgtcgccgcaaaacagccctgtcacgcaacttgtactacgatcacaatagctcagattggtttacttcgtcgatcgaggcacaaaacaaaaagaagcaattaatttaactcaacgggaggagggagacaacgtagcgacgtcagtggcgacaccgacggatagtcggatacgataaaacaaggtgctagctagagcaagctggggtaattaattaagcgcgggaattaaattgatggagaagaagatggacttggccatcgacgggattttcggctaaaacttatagcgatggatgtgtacactagggacgcgcaggtgactggccggagagggaggaggagataggccaatccatccatgggttcagatgaaaacgagagaagcgactgcgaagcgcgggagcgggcgcggccactcagccgtagcccgtaggtacgcgctttgtccgcttcatctccacctctcgggctctcgatcggcaacacggacgccgtttccccggcctacttgcgtggacgcagtccatggacagggcactccactttctacttgagtaggaagtacttcctttatttcggcctagccttttggaaattatcatacagatatacacatagtgtacatatgtgttcacagtaggtgagggtacacgtggacatatacgtttgtaccgtgctatttgatcaagtttatagaaaaaaatagcaacatctacaacatcaaattagtttcactaaatttaacattaatatattttgataatatgtttattttgtattgaaaatactagcatattattctatcaatttgattaaatttaaaaaaatttagttaaggaaaaaaatcaaatgacttgtaatataaaatggaatataaaatggaaggagtaggaagtagtagtaggaagggtgcatgttccagtagggtttctttagtttaagaaaaggttactttattagcagccaattcacaaccgggtatggttattgactattctttgaagtaagtttgctggccattttataaaagcggttaggaacgggagagtattaattaagggtatgtacaattggtgtatcagccgtatgtaagtagtaaaattttatccaagttgaattttcacttacatgaaaaatgagagattgaggagagagatagttgtagtatgtttatttgttgtcgaccatgcttaacagagagcactacgattttcttgatgtgactaagtatatatgcagtctcatatccttacatttactatgggtggatctgctaatctgatgtgttgagcatgcagtaaaaaatactgtgaaacgtagcgttagaataatagacacctcgttgcatatatcttgttttgtcataagtggtcatttaatttattcttttttaacatacagagttaaatatacttctgtttttttttcaaaaagaaatatttctcctaaaaaaattcgttgtcacttcaacgttatatttctattgtttcaagttcaaatatattttcctttctacaatatgaaataacatagacatatacacgatcaacaaacggattctcaataacatactccctccgtcctattatacaagggataatgggtgtatgtaacacattctagtacaatgagtctgaacaaaccgtctgtctagatttattgtactagaatatgttacatccatccattatctcttatattatgggatgtagggagtagaaacgtagaataaagaacattgttgccacgttgatatcttctggatatgaaattgttttccatggaacagtctatcttgatagctaaatctgacgaatttaatccaaagaacctatttattgttctctgggtggtcttatccttcacattgtggtccagtacatgtggaagcaaggattcatctagtgcttactttaaaactttagcctccaaagttgaaaactatggtaaaaattcattacttgcaagttactgatagtactttactctttgtacatatactcttttcagtacagctgatgcaaccggggtgcaaatttcttgtggaagtttctaatgaacggtactcccttttattaaaaggaaaaggataagaggagggtcttaatcaatcatctaacaaaagttgatgacatttgatttagtgattacaatagctaagttaaatgtgctataataaaaaaataaaagaaagaaaaggagtactccttcatttggtgtacccaaaatgaaagggattacaaatgaccaatgtcttagagatatattagcttgaaaacaaatctgaatattcttttatttggacacatgcatacccgctgatcaggctacacgctttatcactaaacccattcacacgtgtatatagtattacatctatccacaaatataatcgattctagatatgcacaggagaagtacatagcaatgatgtctgaaatgtacgtgtaggtacttcctactttccataaaaaaataaattctgactacgaatatgaagaaccatatgtattagggtgtatttagttcacgctaaaattaaaagtttggttaattaaaatgatgtgatggaaaagttggaagtttgtgtgtgtagaaaagttttgatgtgatagaaaagttggaagtttaaaaaaaaaatctttagaactaaactcggcctaaatttatacgcaggatttgatctgttttaggatagggagtctcctcatgacatgtttcatgagaaggaccacttaattctgaatattctcttggacaacggacataaggtgaaatacaccacttaatttgcattcatgctaataaattacatctatggttaaccacaagacctataacatcaaatacctagagttgcaaagaaatcatcatctttttttagctttaataaagacatacactaaagtggtcaagaaaaatagtaggaaaccaatcagtcccagaagaattttacacattcttccttctttacttatctgcacaagacgcacaagaaagaccaggttatctctatgttaggctctttttagttgcaggggtgaaaagttttagcgtgtcatatcggatatatggacacacatttgaagtataaaacgtagactaataataaaacaaattacatattccgcgtataaactgcgagacaaatttattaagcctaattaatccatcattatcaaatgtttaatgtagcaacacattgtcaaatcatgaagaaatgaggcttaaaagattcgtctagcaatttacacgcaatatgtgtaattaactttttttgtctatatttaatactctatatatgtatccaaacattcgatgtgatatgataaaaagtttatgtgtgggaactaaacagggtcttcttagagtagatgttatcccggttttttataaggaaaaagagaaacaggtactctaggaccaggccatgatgaggccaagcggaatctggctcctcgaacttaagctgagccacagaagatcagtacgctgcgtccaccaaccttgcaccagttgggctcgtccatgctccataccccatgttaccccatcgctcattcggccgcgacagcgacagcgttccattgacctgacgcgcttcccgctactaatacccgcgagctccacctccatggccgcaaagcaccatcctctcgcatcaccaattctaaccctaacgacaaccctactctctctctccaacaatcaaagattcgatggccgtgctggtggcgaggcaggggcgggagctgcagcggtacacgagcgccgggggccgcatcgtggtgggttgcatcccgtaccgggtgcgcagcggcggcgagatggaggtgctggtgatcacgtcgcagaaggggcacggcatgatgttccccaagggcgggtgggagctcgacgagtccatggacgaggccgcccgccgcgaggcgctcgaggaggccggcgtccgcggcgacaccgagacgtccctcggctgctggtactacaagagccgccgctacgacaccacctacgagggcttcatgttccctctccgcgtcaccgacgagctcctccagtggcccgagatgtcctcccgcaagcgcacctgggtgagtagtagtagtacatgacccccccatcgcactttgatacacggaaattcgccattctacggcgagaacgatcgaattcgatcgaccaaagaacgaacacgggcgtctaaatgccgattcgattttgtgcaggccacggtgcagcaggcgatggatggatgccagcacggttggatgcgtgaggcgctcgagcggctcgtctcccggcacgccaccaacaagctgcagtctgcgctgtaaacccaaccaaaatcaaagcgagctgagtcgcgcgagaagggaaacgggcgggctacgagcacagcacgggcggcggcgcgaagtcgccggcgtcgtgttcgctctcccggtgaagcggcaggccggccgggctcgatcacatctcgatcgagcaccatatattttggccgccctcaccggagagcgagacgacggcggacgaatgccccgcgcggagatcggagcacgccgacgacgacgactcttcatttggggttgcaggggtcgtcgtcgtgtatacgtacgtcgcggcgaaataacggcgcgagaattttagaaagtttgaagattcggcatcttgtaaaaaaagatcgaagctggaacaagccaattaatttaaaacaccacattgcgaaagcaattcgagattcttcctttgaagcaacaaaaagtgtcaaaatgaaccgcagtaattaccagtgccatttcgtgtcggtacaattaatgagctgattgatggtaattgaagtgttcagcaaaaagaaaatcaagcaattactcaccctactgacaccagacagctcataaacctgctggtaagctcatcgacagctacatgtggacacgctcttccttatctcagcgtgtgtaccgcgattatcttggttcttacccgtggctggaaattaaatgagattccttcgctttgcagaagaagtatccctctctactacattgctcgattgaaacaagtgtgcaagatcacgacacgtagtggaccgaactctcactctcaatctcacatcttgatacacaaactttaaacgcatcgttttcaaattaaacagcattttcagaggggaaagagagatgacaccgcacacttctccctttctggagcagtaataaccaattaattactacggggaggatctcatctggaacaaccgggccctgccaaaaaaccgaaatttccctcgacggcgactgcatctgggccccacgggccgcgccctatgggctgtcactaggctcccccgatttttcaaaagcgtggcctgcagataagaacggatggggccatgtgcacccctgtattttctctgctccaatgagtaaaaaaaaaaaaaacaagaagaaaagccaaccggtgccttgctgcctcgccgcactgccgatcgacggcgacatgcccgacggcgaccccgatcggctcggattaatgcgtagactgacttgacttagggagggcaataagatttgtctggggccgtaaaattattggggctggtcggcacggtgacggggcaataataataataatcataatcataatcataatacagtgcttagaaagagatgagacgagatgattaatcaatctgggcaccttgtgttgctctggtccacgtatgcaacgcgacctcgctgtcaaggcgttaggtgctgcgagataaactagtgacaagtcccggctctcgcttacgcgagccaagtaggactagtagatgataaaaacaacttggcgccctctgttttgtttggacccctccacaccgggcgtgaaagtttaactaatcgtgttaattaatctgtcgtttcgggcttgtaaccatcggtggaaattttggtgccggtgattcggtgtgtgctttatttccttcctcgcggtggaagtggaatccgctttttaccgtgtagagacgtaagtatgtgagagggagacgacgataaacttgcgtcaccgacgctgtgacatgtcaacgaagacaaaaccactagacaaagattttattttttggtgcttctttttttcttttctctttttgatgaaggaggcgttaatgctggtaactctcacttccgcctggtttcttaactgttcgtgagctgcgtgtgccatgtttgcatggaacgacgctcgccgtatagtagttgcagttcacgccgcagaaacacactaattttgacaaattgacttttttagaaaacttatttcaagaataagccgtgtcaaaaacttattgcaaaaataggccggcggctcagcgttataaatattagcgctgaggtataacgctttagcgccatatatattagcgctaacatttcatccgaggtaaaattaccagctcaataggggttagcgccatagcttttggggctgacctattagcagtattaaaaactctctggaacattctgttatgcgtgcgcgatgctagtgggatggtcatgtgcttttgctcccagtgcacagaccacagttcgaacccaggcatgcacatctttagaattattttttttatcaatttatattttctttgcaaactacacattttgcttgcattcaatgctatatactagtacttttttttatcaattgtaagtatgaaatgctatatactacatgttctcatatttttattatggttcttttgactcataactataaaaataaatactatgtaatttatgttaacacttacctcctaattttttattttaaaattacatttcttacatttatgtgtaatgatcttgttttaaacataaaacatatgaaatgttaaatgctgcgtactttcaaaattttatgaatataagtattaatgctataaaatttatgttctcaaatttagttgttcctaatttataagactaataaaaaatatgctataaaaataaaaaaaacatccaaaggatgtaaaacatagggattgaaccgtggttaatgagatgagaggcaaagtctcctgccaccacactacacgagaacatgcaaaccaaaaagtccagaagatcattttcaacgtcaatagctcagcgccgtaagctatgccactaaccccagtgacttggcaaatttttttaccatctcagatgaaatgtcagcgctaatatacatggcgctaaggcattatacctcagcgccaataagtttggcgctgagacgacggcctatttttgcaataagtttttggtatggtttatttttaaaataagttttctcagagggtcaatttgtcaaaattacgggcagaaacagcgaagaatcgtctccggtccggccgagcgaacggacgggctcgttcaagcgggggcagctcgaccggaccgggggggccaagtggcaacttgacacgatcaagtcacggagtcgcagcgtacgacgggcgggttggcggcccgagcccgacggcggcgcggttggtgcagtgagcaagtgtgcagcaggcgcgagcacgagggaggcacgccggctggaccgagaccgacctggcgtcgagttggtccgtgaaccattagcgcttgttgggctggcggctgtggagttggcctgcactggatccttctgtttctacagatgggcttcatgggtaggaatttgctctgtttgggctaagtttagcccgtaaaggaattggtctattttccgtctcaactcttagacctggttgaatcgacttcctcaaccatacatctcttgaaaaccggtgtaaatagactccttatggtttcaggatcagttctatcttacgtggcgctcgtgatacccacatatcagtaaaaaaaaatttactgccccacatattatcctaatctccttttctatttcctcacctcacccctctctctgccgttctctctctccaggcggcagcaaaggctagcatcaccgggggtggtggcgatgcacggggaaaaaaaggagtcaggagatggaagaggaagatgcgatgcaaagatgccgacggcttccagggagaaggacgcgaagccatgcgagtgtgacgaagtgcagggcagggactgatggacgagatgacgcggttgccgtcgtgacgtccctctctgctgctgggcttgtctatatggcatcatcgccaagagccgttgaaggcggtggcaagatgggtggtgcgcaggggagaagcttgtcggccggctatagggtgtgggccccaaggacttggcatgtcgctgccgccaactggagagagagaacggaaagagataggggagtagagatgaaaaagaaaaaggcaataaggatgattgacatgtgtgattatttttttaatttttattgacatgtgggtcctacaagcaccacaataaaaccgcttttgaaaccacgaatgagtcgatttacagtggttttaaagatgggagaaacgttatgcctggtttttaggttaagggaagcgatttaaacagaggcaagagacattattacaagggtggggctcggcctttgaaccatacgtgggacaagtttctgcctcatacaaatgagagacaaaatagacttttttttcctgcaaaatactactagtagtaaattaggttgggctcactaaactagaaatgacaaagaagcaagttagcggattatctttattttacaacggtataaaagaagaagagccgtcctacttttattctctcctcccaccacatgctcgcatctcatatataaacttgtgaaacttactctaaccatatagaaccattgcaatacacgggcatatattactagttacacctaattttgtggagtttcatacccaattgagataaggaataattagatttaatgcatatttttctataaattagttttgatatatatcttttagtttctaatttcatatagtttatcttttaaatacaaaacatattttaaaatagaaatatatttcatacacgattatacacaaagcaatcaatgtaaatactagacgccaaaattaaagatagatatatactagctaagtagatgtatagatagatagactcatagataggctgttggagacggaattggctaattataggttgtatttgggcgagtttatttggcccgcaaacgaatcgaccaaagctttgcataggaaatttttgccgatcgtcggagagtacaaacgaggcgcgcgcacgcagcaccagaggcgagtgacccaacaacaaatggaggttcgtcgacgatggtcgtctccggcgacggctgcggccatggctctcgtcctgttcgcctcgtcgtcctcctgtaaacgccctgtaacacacaatatcctctgtggcacgcgcgcgtgcgtgcgcgtctgatttgttggtctcgtgtctcgttaatttgcttactcgatcgctacgttttccattacgaatttgcgatcgatccgaggaaagggagcccggcggcggcggcggcggttggcgctgcgacggaactgcagaagcacgtggcgttcttcgacagcaaccacgacggcatcatctccttctccgagacgtacgaaggtgggtggccatgcctgtcctatcctccgttttctgcttgctaaatgtcaaacgcagccttatatctcccttaaattgttacagcataatttcttttaatatgttgtttcaattcaagggagatctaagactgcattttgatattttttttaatggtgcctgcagggttccgtgcgctcggatttggagttgttacctccagattcagcgcgaccgtaatcaatggcgccctcggtaccaagaccagacctgtatgatctgtcacatctttatatatgtttcgtttggcgcataattcccctggttatgcgtgatataaagaaaaaaactgacagtttgtgctttttccaaatttccaaatgcacgcaggaaaatgcaacagcatcacggttttctatctatatagagaacatccacaaaggggtccatggaagtgatactggcgcattcgattcagaaggaaggtagtcatttcgtagactctccaaacagtaatgatacaagcgagttcagcaaattgccttggattgtctgaactgtttgcaacatagattattcttttacgttcttccacacatataattcacaatcatctttttgatatgctagtagtatattcaactctgctgcaggtttgtcaatgaaaagttcgatgagatatttaccaagcatgcaaaaactgtacccgatggcctgacagcagccgaactggacgagatgcttcgtgcaaacagagaacccaaggactacaaaggatggtaatctcttgctagctgatagcttcagaaaccatatgcatgtatatctgttcaaatggtctgctcactgtattcgcttgcactacttttgtaccacgagaaaatgcagggtcggagcatcgacggagtgggagacgacgttcaagctcgggaaggacaaggatggtttccttcgcaaggacactgtcagaactgtctacgatgggagcttcttcagtaaagtggcgtcgaagaagaagggtccctctgcaaaccaagcatgattgggattttggaaggaaaaatgtactaaattgatagaacatgtcaaggcatccctaaaatgaatggtccatatatatttacccaggaaatgttccaaagtggcttgcatttgcgtaagggcagaaacgttgaaaccgttcgccaaatggcggaaaagcagtggcatataagaacaacgtttcagtaacggtgatggccttttctggcttcctcacacgaacagtctgggctttggattaagccgtttgttgtttctccctgactgggagatcaagcactagtataatgatttcaatccacaaacggcctctcgattcaatccacctattaatgtttggtgttctttttttctgaagatgaagaagaacgccgtgtttagttccaaagttatttttcaaactttcaactttttcatcacatcaaaactttccgacacacacaaacttttaacttttccatcacatcgtttcaatttcaaccaaactttcaattttggtgtgaactaaacacagccgaagatgaagattaagttttttacgtaaaacgagatggcattaacgtatgattgattgagttttaattattacaaatttaaaaaatagattaatacgatattttagtgcaactttcatatagaaagttttcgtacgaaacacatcatttagcagtttgaaaagcgtgccacgagtatccaaaatttcatcccctctgcatagtggaaagatgtagtttttacgatgctccttatgagtagtttttacgatgagaaatggatgaaaatttagatacttgtgtcatgcttttcaaaccactaaacatcgcgtttcgtgcaaaaactttctatatgaaagttgttctaaaatatcagataaatctattttttaagtttgtaataattaaaactcaattaatcatacgttaataccacctcactttgcgtaaaccacttaatcttcatctacgggagaaaagaataccacataagtaatactaccatattaattaattaaatagtgataatagaatgacttttttttactgattgtagggctcataaatcgatgaatcaatggttaactataatatacactaccatatataattaactatcgataatagaatgatctttttttactgatagtaggactcataaatcaatgaatcaattagtagttaagattgctgctacgtggtcagtggagagcactgctttagtgggaaatatttcttatttctcacacgcaaataggggtgaaaacggggcgggtatttcccgtccgccgcccgcccgtattaatctgggataaattcgggtcaaaaattcgggtacccgagtactttcacggatatcggattcaaatacgaattttttctagcggatacgagatcgggttcgggaggacagtatctgtatccggtaaattatgcgggtattacccagttaactacccgtatatgacccgaactgctacaaccaccagggagacgagcaggcatcagcctgagggcgccgcatgccgcacgcgagcaaccaaccactggcactgaggcacaggcgcacagccggcgccgccgccggcgtcgtgcatgctagccgctaggcgctgtgctagctgctagtggctacgctgctgcgcgcccgcgcccgctggccgctggccgctgttgaccgccgccgaccaccgtcgcaaggccccgcctaccaccgccgaggcgccgaccatctcttccggtagtcacctctcagcaggtcatccaggtgagcaaaagttcagtgttttattgctttatcaacatcaccttacgacttgaagttcagtgttttattttacttttactgtttggctgtaggattaggatagaatggctagtggtaatgcaaacactagtatctgtgtcaaggacaaagttacaagtgtggaggagcaacaacgtaaagcaaaatgctgaaccgtgaactatggtctacaccattgagtatttgagtctgtacgcctactttggatctgttgtgctgataggtattaccattccctaagtctctaatatatattcatattatacgtatatggaatgattgaacgactattgcctatgtggtatatatggttattgctttgatttgatatccgaataaggattcgtaaccgatagtgttcgtatctgacttggtacgtattcgttccgtatttaatcccgacattatccgtgcttgtattcgtatccgataatatccgtgcccgacccgatccctattttaaaatgtgggttaggatacggaaaggatgagatccgaccgaacccgacccgttttcacccctacacgcaaatagtaacataactgctaaaaaaacttgcgatagattttctaccataaaattttcgaatttgtagctgtcagatcgcctcatgattcgtgctggtggaggaggaaaaaaatttacaagtggaggaggaaaaaaatttacaagtgcgccaggacctagggattaaactcacaacctctctaatttcatgcatatattctatttcgtatggacaaggattcacagctgtattttttatttttactaaaatttgtagaagttgaatttcaacttacatatttgtgaagttatatatctcatagtaatatatcttgtattttttttactatctaggtgacatgaaaaaaacatgagaaatactttcccattttgtataaaatagatcttaaaaatcagaatatatttcacatataacttcgggtcgacatatttttcggctaaataaagtaactttgtctgccatctaatcttcttcactattcgtgcaagcttcaaagtgcatctagacaagccgatcgaacaacttgttcccaaggtggcgagtcctttttctctacatgacacgtgctagtcagtgaatgtaactacattatttatacagtaattatatatgtaactacaaattacactatagttacatgtgtaattagtttataattacacaataacttttatatatttttattgtaaatattcgttgatagtttttctagataaaagttaatttatgttgtgtattttaaccagattgcttttatttttaaagttcaccttagcatattaatgatttgtgttgcctttgattataaccgtaacttactaatgttattttaatcatgcgaactaaaatccgactgtgtggagcttagatttgtggcaccattattatagatgctgagtatttgactatttgggtgagtatcgcctgcaagcgataggtttgcatggaaaattttagccgatcgtagaaacacgcgaagcacgtggcgccagagggagaggagcacatatacagccttcagcgggtaagcgagggatcaagaagcagaggtggctcggaacagccggaaacggcagcggaggctcgacgacggcggctgtcgtccctggccggcgacaacgatatggcggcggtcgcggccgtgcctctcctcctcctgtccgccgcatgcttctgtacgtaaggcccctgtaattaatactccccctttcgctaaattttgacgccgttgatttttttaaacatgtttaactgttcgtcttattttaaaaaattttgtgaaatatgtaaaaatatatgtatatataaaagtatatttaaccatgaattaaatggtagaaaaaaattaataattatttaaattttttaaataagataaatagtcaaatgtgtttaaatcaatggcgttaaatatttagagatgaagggagtactagtcatcctctggcacgcgcgtttcgtttccaattatgtttacgatcgaggaagggagccagccggcggcggtgggcggcgacgccccggcaacggagctacagaagcacgtggcgttcttcgacagcgaccacgacggcatcatcacctttggcgagacgtacagaggtggccacgcccgccctgccttgattttctctgctagagtattcgataatttctacttggccttgtactcttctattttaaaatatatgataccgttaatttttatataatatttaactatttatcttatttaaaaaattatataaatattatttattttattgtgatatgttttatcatcaaagaactataatattaacttacacttttacatatttatactaattttttaatatatttatactagttcttttaataaaacgaattatcacacgatatgcgaaaagccaatggtatcatatattttgaaatgagggtagtatgctttttcaattgataaagggatgtgatttaggctgcattttggactttatatggtgccagggctccgcaccctcggatttgggattttcggcgccaccgtgagtgctaccttcatcaatggcgacatcggccccaaaactagacctgtatgatctctcttatgccctgtgaacgtatataaaaaaaatatgtagtgcaacctctacatatatacatacatacatagagtaaatagtttattcatggagacagataaatcttatacgtccattttcctatcctacgatagttttcagctttgcacaatatacataaagtttgcaccacatatttttttctatatacacagcgcatgacgcctttgtataatttatattatatatatgttctcattcaacgcataattcacctcatatttaagatgacaacctcaagagttgaacttttccaaatgcatgcaggaagacgcagatgggtcatggttttctatctatgtacagaacattcataaagggatccatggaagtgatacgggtgcattcgattctgaaggaaggtacaccgtgctctcctcatccatttgggaacgtgtctagattataaacgagtactagatgccacatgcattttgtgattattaaactagtaaaggcttatctggtttggaatttttaaggatttaaactttttcatgtgagaatcatgcaaaattcatgtattccgaggaagccccacaaaaaaatacctaaatacggctatactcaacttgggtgtgtttagttcaagctaaaattgaaaatttgattgaaattagaacgatgtgacggaaaagttgaaagtttatatgtgtaggaaagttttgatgtgatagaaaagttaaaaatttaaagaaaaagttgagaactaaactagactaggcctctgctatgcaggtttgttagtgaaaaattcaatgagatattcaccaggcatgcaaaaactgtacccgacggcctgacatcagacgagctggacgagatgcttcatgcatacgcagatcatacagagcacaaagacagctcaggatggtaatcttttgctagcttgttgcttcaagaatcatagggtatttttttacccggcatctatatccaaccggatatatacaactattttaattaggaacttagtctatcaaatagaaaacttagtgcttcaagaatcataaatggtataactatatatatttattcacctgtggttgttggagtaatgggtgtctttagttcatgccaaaattagaagtttggttgtaattagaatgatgtgacggaaaagttgaaagtttgtatgtgtaggataattttgatgtgatgaaaaattttaaagtttagagaaaaattttgaaagtaaactcggcctaagatcgagaaaatgcaggctccaggctgcaacagagtggcgggcgacattcgaggccgccaaggacaaggacgacatccttcgcaaggacaccgtcagagccgtctacgacgggagcttcttcagtaaactggcgaaggagaatgacgactaaggctgtgttcgcatgtggatgatgggaacatagtgactccgcacggaaaacggagcgatctattagcacgtgattaattaagtattagttaattttttttcaaacataaattaatttgattttttaaacaacttttgtatagaaactttttgtaaaaaatacaccgtttagcagtttgaaaagcgtgcacgcgaaaaacgagggatttgggttgggaacctagaggtccaaacacactctaacggggtgtttagatggggctaaaactttttagcccatgtcacatcggatgtttggacgctaatttggagtattaaacatagactaataaaaaaactaatttcataaatgagagctaatccgcgagacgatttttttaagcctaattaatctataattataaaaagtttactgtagcatcacattgtcaaaatcatgacataattagactcaaaagattcgtctcgtgaattagtccaaggatatggaatgtgttttgtaattagtgtatgtttaatactctaaattaatatccaaacatccgatgtgacatggatttggaataagtccctggaaaccaaacaggccctaagggtccttctgcgccgcgaagcaagcatggctggttgtgatggttacctctctttatgatcggagtaccaagggcttcatcactttgttgttaaaatcagtcttattaaattttgataagttttgacgttacccaaggtactgttgtataaatatttagcttaatacttttgtatgactagcaaatatgcccgtgcgttgcaacgggtgaaaaaacgtaatgataatatacgtttttcatgcataaccatgtcgataacaatcagaaaattagaactacgaaactttattttctagcgcgttttcttttgtgcttttttctgacattttttcctttttttagattagattagattagagataaaaaagatatataaatggactaaaaaacgacgaatataaatttgacttttttcctccgcgcttttttccgttcttttaattttttttctcgtgcatttcttttacgaagggtttttttcaccactttcacatagtgtcaaacctttctagatataataggattcgattttttttaccgcatcacgtataattcctttttctttagaaacagacaattttttcgcccttttttatcgcgtcaacggagtcggaatcgttttgattttttcccctttttttggatcggacagatttttttttgcccggtttatttcgcccgatcgattttttttaccgcgtcacatataattccttttactttggatttttttcgccctttttttaccgcgtcgacggagtcggattcgttttgattttttttctccctttactttggaattttttcgccctgttttcaccacgtcgacggagtcggattcgttttgatttttcccctttttggctttttttggataggacagatttgtttttttttcgccccgtttttttatcggacttttatcttttttttcgcctggtttttttatttttttaccgcgtcacatataattcctttttctttatcggaaagttttttttcgcctttttttaccgcgtcgatggagtcagattcttttcagctttttccttttcttttatcggacaaatttttttttcgcccatttttttttctcctgtttttttcggatcggactatttttttcttttttcgcccggtcgatttttttaccacgatatatataattcctttttctttggaataggacagttttctttttatttttttaaactctttttaccgcatcgatgtagtcggattcgtttcgatttttttcctttttttgctttcttttttgtcggacagatttgttttttttccacccggtttttttccgcccaggtttttttatcggacttttcttttttttttctccacgatacatataattcatttttctttggaataggacagttttctttttatttttttaaactctttttaccgcgtcgatgtagtcggattcgtttcggtattttttcctttttttcctttttttttgtcggacatatttgttttttttccgcccggttttttttcgccaggtttttttatcggacttttctttttttttcgctcggtttttttctcccgttttttgacggacgacagaagcacctagagaagtgtttttttttttcttttctccaatccaatacagatcggatctcttccagggaaatcagattttttttctccagggaatcgaactcttttttttcgttttttttattcattaaacggtttgtctctcggacttttttttccctttttaagggatcgggtgtttttttgccagggacgggtgtttttttcgcccggttttttttcacttttttttttggatcggacttttttttcgtccggtttttttgatcagacaaacttggttttttctgcccggtttttttgacggacgatggaagcacctcttattttttaagtagtagtagatttggcagcatttttatgagaggaaaaattccaaaactattaaattttggtaggatatatagcatttgataaaaccatgtttagttcgttagcctagcaaaatttgatgttctcctttaacgaatcgtataagatagtgtggggttttatattggcagagagaaaaaaataaagacctaaaaaaaacaacaaacaattttgatagattgaaagtgtcaataaagtaaacaagcccataagtttgtgatatatcggtcgatgcctgcaaatcaaagagcaccctgcaaaagtggttgtctctctgaagtctgaacaagaaaaaacagagccagggcgccatgaaacgaatgatccatatttacctaggaaatagtcctaaaaaagaaaacctaggaaatgcccggaagtcatatgcatttgcgtagggacaaaaacgtggaaatcggttcaccaaatggtggaaagtagcggcacgttagaacatcgtcttaacaacggtaatgagtctaatgaccttttctggattctcgcacgaagccacgaactacctagctttgctttaagctgtcgtttgtttatccctgtcacggagctcaatcagcaggtgttactctcctcaatggccagtcaaaataaatccacggtgggattgtcttcaactttcagttttcacacgcaaatagtagtaaccttctgccaactaccatttcatttcgtgtaggcagtcatttacaatcttacatgttttcagctttaaaaaaaaactgtcatctgataggccccttcattgattaaactatacataatagtatgccaactaatcatactactccgtagtagtagtagtatgctagtttgagtatgccaaccatttcatttcatctcgtatttggcaatttgagtatatgccaacttaaaacatacgagtattaccagtttgagtatgccaaccatcctatttcgtatttggcaattttaagtataccaactcaacatactagtattatcattttgagtataccaaacatttcatttcgtatttggcaatttgagtaggccaactcaatacactagtattgccaatttgagtatgccaaacatttcatttcatatttgacaatttgagtatgccaacctaacatattacttcatcatactttttaagctaccaggcctaatatatagctaataaaattaaagccacactttaactatatattagcgattctaatcaactgattcctaagattgatagatgagcacggtctcgatcgactctcgacagcacacgacacgcacatggtgctgaactaagtgtgtaggtattatcttcttctgcctaccatgttgctcctatatatataaggcggacatccatagtggccacacgtctccaaaagactcgggagaagagatctaacagtcaactcgtaaaatactccctacgtttcatattttaaattatttgactttttttagttaaacttgttaaagcctatgtttataaaaaatatattagtattttaacataaaataaacatattataaaaatatgtttgagagtagaaacagccggcgaagcgtgacgatggacgctcgacggcggcggctgtccccggtggtggtcgtagcggcttttcttttcttccccctgttcttcggtaaggctgcgatttccatctctctcttcttcttttctttttccctttttttacattttttgtttggttatgtcctgaaagggagccagccggcggcggcgtacggcgaggcttcaggcgccggcggcatgacggcactgcagaagcacgcggcgttcttcgacaaggacaatgacggcttcgtctccccgaccgagacatacgacggtgagcttcaaaggccttctaaatttctagtactttctcgtttcgcttgtgaactgaacacgatttggttggtcttggtctgcgcgtattttcgcctcattttatcctctcatggttgcatgcatcgcagggttacgcgccctcggacttggagctggcttctccatcttaagcgctgcgttgatcaatggcgtactttcactcaagaccagacctgtacgatcagtatctctctctctctctctctctctctctctctctctctctccggctcaaaaaactatctgaagtttttatcgttttatttactgaatttaaggtgcctcactagtcactacaatgacgtgccgttttgagagttgttatcatcgcttaactactgatgacaaatactccctctgtccctaaaaaacgaatctaaaactgaatatgacatattttagtactatgaatctggacatatgtatgtccacatatatctagatttgtagtattaggatttatcattcagtactaagttgatttttatgggacggagggggtagttgtgtagtgttaggctatcaacttcagtagtggcttagtatagttcgtgtgccaattttttttagtatacggatacatatttgaagtattaaacgtagattaataacaaaacaaattacagattccgcctataaactacgaaatgaatttattaagcctaattaatccatcattagcaaatgtttattgtagcatcacattgtaaaatcatagcgtaaaagattcgtctcgtaatttacagtcggactgtgcaattgtttttttttcatccatatttgatgctctatacatgtgtgtaaatatttgatctgatgaaaaagttgaaaatttgaaggaaaaagttagaatctaaacacggccagtattgaaaatctaacccttccatgtacttcactgctactgtcctgatcagacctcaattctggacagccgcttttcttctacagtaatgttctataattattatttttttctctaagatcgttagaacgtctctccatgtactcgttttaggttataagatgttttgactttggttaaaatcaaactgctttaagttttaccaagtttatagaaaaaaatagtaatattttttaccaaagataaatttattataaaaatatatttaattattaatttaataaaactaatttagtaatgtaaattactatgtttgtatataaacttagtcaaacttatagaagtttgactttgaccaaagttaaaatatcttataacctaaaataaaaggagtatgtttttaagtgaaccatttccaatgaatgacacattacatacaaaaaaaaaaggcgtcaaattaatcgttggatcatgttgaattcacgcaggacaatgcaacatcaccacgcttagataatgggaatttataaaacccggcttctacaccaacggggatgtatacagccacagaaaatccgaccaaacaagctcagttcatacacacatgttcacaaacaaaaggagcacaaaggctcaagcacaccttacataaaactaaaagagcacaaagacttccaacgcctttcaaagtgaaaagaccttccaaataaactaatgaccacattactcctttaaccgctttctcatgttccatccatctttaccaaagaagtgcatgacagatgtctctaacagtttgcatccttccttcatcacatcgcgctcatcttctttaagcagcaaggaccattgtcgagcccaatacgtccccctgaaaataacctgcaagtaagagttaaaattggagccattgaagaccacatcatttctacaaatccacattgcccacaacaacgccacaatccctataaagatttggtgctttagcctagattgtaaaccctttagccaaatcccaaacatattagcaacactgttaggcggatttatcccaaatgttataaaaagggtactccaaacaaatctagccacatgacaatcaaaaaagagatgttgtatcgtttcattgtggttacaaaaacaacacttagtgatgcccttccaatttctttttgctagattgtccttcgtgagaatcactcccttctttaaataccagaggaagattttgtttttcaaaggaattctaagcttccaaattaaatccttccttggcactacattctcatacataatcattttatacatggaactaaccgaaaatattctggttttgttaactttccaaataagcttgtctctatggtttgagagcctaacaagaaccactttagccactaggttaaaccatgcaaccaaattctcccccaccaaagcccttctgaactcaacatttaacggcactttatctataacatccgcaacaatagcattcttattccttacaagattgtataaattagggtacaacttttcaaaaggtaaatcaccaatccagcaatcctcctagaatcttatctgagaaccatcccccaccttaaaggcaccgcctttaaaaaagacatccctcatccccattagcctagcccagaaatgtgaatctccagggcgtttctcgacttgtgtgatggttttcttagtcaagtatttattcctaagaatgtcctgccaaaccccttcttcattgatgagtttgtacaactatttgctaagcaagcatttgttttgtatctctaagttccgtatacccaagccaccacattcctttggtttgcacaatacactccatcttgctaacctatacttcttcttatgttcatcacattgccagaaaaatctagatctataatagtctagctttttgagaatacccttagggatctcaaagaaggacaacatgaacatcgctaaactacttaacactgaattgataaggaccaaccttcctcctaccaagagaaattttcctttccaactactcagtttcttttgaatcctctcctccacaccctgccaatccttattgttgattctcttgtgatgcattggaatccctaagtatttaaaagggtaatccccggtatcacacccaaataatttgacgtactcatgctccacatcttttgccttgccatagcaaaataactcactcttatggaaattaatctttaagccagataatttctcaaatgcacttagtacaagcttgagatctctggcttcatcaagatcatgatccataaaaagaatagtatcatcagcgtattgtaaaatagaaagaccattatcaactaaatgaggtaccactactttgaatctgccttgatctttcgctctttgtattaaaatggctaacatatctgcaacaagattgaacagaataggtgacaaaggatcaccttgcctcaaacctttccttgtttgaaaataactcccaatctcatcatttactttgactgccacactcccacccctaacaatcgagtcaatccaatcgcaccacttagaagagaaacctttcattcacaatgactgttgtagaaacttccaatcaactttgtcatatgctttctcaaagtcttgctttagaatcacccattcttctttttcttgtgcaattcatgaagtgtttcatgcaaaattaccactccttccataatgttccttcctggcaggaaagctgtctgcgaaggtttaatgaccttctgagccactagggctattcgattggccattatcttcgtaaaaattttaaaactaacattcaacagacaaatgggcctatactgttgaattctactagcgtccttttgtttgggaaggagagtaatgattccaaaatttaatctgtgcagtggcaaagttccttcataaaaatcgtgaaagagggccataagatcatccttgattacatcccagaacacttggtaaaactctgctgggaaaccatcaagtcccggagctttgttgtgttccatttgaaaatttgcttctttaacttccaactccttgaagctttcactcaacaactcattctcaacatccgtgacttgtgtaatatcatctctttgggattccaccatagaaaaattattttccttcggcgctccaaaaagatttttataatacttggatatgtatttctttaattgcacatcacccttaatcacaccctcctcttgctctaattgaaagattctcgtcttcctatgcttgccattggccactaaatgataatatttcatgttacggtctccttctattatgtgcttagtttttgccctttggtaccattttatttcttcttccctcaacaattgggccaatctattttttacaaagagtttcaaatctaactcctgattagacaacagttggacttcagccttcttttctagcttgtctgcttttgctatcaaaagaaccttctccctcttgttcgccccgctaacattcttcgcccaccctctcaaaaactgtcagagcctacgaatcttaaattgccatttttccaacatattagaccctctactttcctttctccaaatgtctgctactagatccacaaagccatctcttagcaaccatccaagctcaaacttgaacaacagttgtttattagcatgtgtcccagcccccgtatccagcaacaaaggagtatggtcagagagttctctattaagagccctgacagttgctaacggatacttttgttcccattcagtactcattagcactctatccaacttctcaaaagttggattgtgcaacgagttggcccatgtaaattttcgaccagagagttctagttctctcaaatccaggctgtctatgacagcgttgaacaaaaaaggccactttacattaaagttattattattcttttcactagccttccttatgatattgaagtctcctcccataagaataggtatagactctttattacaagcattaacaagctctacaaggaaagcctccttatattcttcttgtgttgccccatacactgccagaacgcaccattggaagccatctaccttattttgcacatggaactttacatagaaatctccctcatctatacttgcaacctcaaagaattccaaattaacccccaaaagaatacccccaggtctccccttcggtcttgtccaatgccacataaaatctttaccaccacaaatattttttagactagaatatgaaaaatcatgttttccagtttccaaaagagtaatgaagtctagcttccactccttggaagtctctgaaaggaatctaaatttagccaagtcacctagatctctgctattccaaaaaattcctttcatgacatacttttcttatttttcaagatcactttcaccttttgtcccttgtttcttttgaagaatgacttggacttataaaccttgaaacccttttttaagtcacaacttaggtgatcgggttcttcgtccataacttcgtccactaagccaccacataagtgaccaaggactaagttatccaccatctcatcctcctctgactcaagttctccttctatgtttccaactaaatcagctttaggtgcaacataatttctaagtctagtctcttcaacatttttcaaactaattattgaacctaaaatttcagcactagagctaccaagattaatacctatgttgcataggttatcaataatagaaggacaagacaaagacaaaaatgaaccattaacatcattacctgactttatctatctacatagagaacatccataaggcgattcatggaagtgatttaggagcttatgattctgaaagaaggcgattaagcctgcaatctatagattgcagactgcttatgatggaagcctgtttgcgaagctggtgaaggcgaggagataggagcaaaaccaggcatgattgttgacagctgacgagagcttctgcattgatcctcctaattaagcatctcagattatgtgccactgtgctatgtgaacggctgactgtgtattcttttactccctctctaccaatatacgagacaaagcttttgccctcctttaaaaaaaagagaacaattgagattatgtccttttttttcttttcgagaatacgaggagacgatttgtaccggattttaaagatgagggaggccctatacttggttgtgtgattgatgcttgatgaggttattcaaccagcagatagaaatcagggatgctaaatagacttattcagcaaatatacgcttggatgggttgttatcgtattacaatccgttggaaaaggcccattaccaccgggaaaactacctcggagcccacgcaaaaattacgacagaaatccgacccacactgcgctcctagtcttccactcttcctcgcttcatccgctctgcgcctctacccctctgatacatgtctgggaggtctttacctgtataccattaagggctcgttcggattataggataggaaaaacttaggataggaaatttataggaataggaaaggaatttaagtgtaaaatagaggaatgaaaaacaaaggaatacaaaagttgagagcattcagatcacaggaaattgattgcctaggatttgcatgcagaaagcgaaaaaaaagagctcgaggtggatggattttcctgtacttttcctgtgaaattagcatcaaaggaaactttcctttggatttcctacaaccagttttcatgatccgaatgacaggaaaggaacaaaatcctatatacagtattcctccaaaaatcctgtgaagttcctctaatccgaataagccctaagaaagatggtgcctgcctctgtgccactaaaaagtttgaaccttcctctatgccatcgtcgaactttatcacgccctccacaccattccgtcgctattctgtgtgagtttaaccgtttggcagctctgacatgtgggcccgggcaggaaatgtcgctcttgcccttttagtgtctgcttcgtttcagagagaggccaggcggcgtggcggacaagcagccaagcgcggcattgaggcaagcgaccggtgtggcgggcggcaaccagccgagggacggggtggtgtggcggccaaccgacacgagcagcgaggcagcggatgaggaggtgaagaggcccgtcccggaggagaagtcgaagcccgtcatcgtaagtagggtgctggtgcagacctcgatctacacaaaggaagaggtgaatgccatcctgatccagtgcggccggctcagccggagctcgtcatcgtcggggatgcgcctcgtcgtcgaccgtcgatcccatcgtcgtggcgcaggttggggctgacgctggtaggagggtcgtcgtcggggatgcgccggctcctcgccaccatgggggccgccgaggaggccgcggcgtccgcggccgccgccgccgccgtcctggcgctctttgtcggtggcgcccccgtcggcgggatcgatggtctcatgggcctccacctcagtggccgtctcgtcccgcgcttcaaggaggtaggctagcgcgcgcgctctctctctctcaaccctaagggcaacaaagtcatttggttgcgctgttacccgccgttgggacaaaaacggacggaatggtgtggatggcgcgataaagttcgatgatgacataggagaggctcgaactttttagtagcacggagacaatactatcttttttaatggtatataggtaataaaaacctcccagtctggcagtctcctccgccttgggctcgtgtctccgtgcagcgcgccgcctctccccaccgccgccgcctacacacctccccacaccaatacaccatcatcccgtcgccgccaccatgctccgctagttcgctctggcctaaggctgctcggctcctctcgacatccccgtcgcggcagcctcaactgccctcgccactgtcgaggcggcttcagtccatgccaccgccgtatagacggccttgatctgcaatgttcaaacgaggtctcccgcccccgcctcatctgtgataatggcatcggtgtgatgaccacagaggatggtcgctggtcggcatcggcggcatggctggacagcatcggcggcaagactggaagctgcccacgcccaggatacatggtggcatgctgatctatggctctaagaatgaaattggcagtagctttgatttttggtctgcaattcgatgagatgttcttgattttcgattaccaatgttcttgatttccagatgcttgatattatccacccaaacggtatatacgaggggttcttttactttaccggtaattatgagtaacacaaagttaaacttatatttggattacaagggtataaaggtccctatcctgctagagtgtttgtctgtttgagaagcaaggaaaaacagggctgaaatgaatgatccatatttaccaaggaaatcctcggaagtcatatgcatttgcgtggggacagaaacttagaaaccgttcaccaaacggtggaaaagcagcggcacgtaagaacaacgtggttatggccttttctggcttcctcacacgaacaacctggctcatttgtatttaagccgttgttgttttctcgctgtcacggagcccaatcagtaattgttactctcctcaaacagccagtcaaaatagtaaacctttttccaaccatttaatttcgcgtagccagtcatgcacactatacaaattttacaggtttcctattcagcgagaaaaacccagtcatctgatagacaggttcatcaattgaaacataacaatctgacgagaaatctgtgacagatacagaatgacagcgattctcgccaattgattccattcctaagattaatggatagatgaatggctagattggtgggaggctaccgtaaacatacaagagacacctaagaaggcactccgcactttgatgttgttggtcgcctgggagatatggaacgaaaggaatcgcagaaccttccaacagaatgagctttcagctacctcccttttagccaagaacaagaaagaggccaaaacttgggccttaacaggagcgagaagttttaatagctggctttcttttagttagctcggaccaaaggtcctagctcctttctttttttcttttactttataaagttccccttctctattcaataaaattggcgctcgtccattcgttcaagaaaaaaaattgagcactgtctcgagagtacacggcacgcagcaatgttgtttaagagtgtgggcattatcctcttccaaatcgtggttaaggcctggtgtcaaaaaaaaatcgaggttaaggcagtgtttagttccttcaaactacaaaaaattccgtcaaatcaaatgtttggacatatacatgaagcattaaatgtgaacgaataaaaaactaattgcacagtttgcatgtaaattacgagacgaatcttttaaagcctaattacgtcatgatttgacaatgtaatgctacggtaaatatttactaataatagattaattaggcttaataaattcgtctcgtggtttatagacgaaatctataatttattttgttattagtctacgtttaatacttcaaatatacgtcgatatatatattttggtacacgaagtaaacccggcctaagctggcgagttagggacctgacatatctatcatgttgctcgctatatatagcgcggatatctggacacagaggccacacgccgtcgagactcgagagattcaggaacagaaaccgccgagagagttcgtagcagtcaacgcgcgaggcagggccgagaagaaaccgccggcgacgcacgcgcgatggacgctcggcggaggcggttgtccccggcggtggccgtggcggcggctcttcttttcttccccatgttcttcggtgaggctgcgatttccgtctctttttttttgtttcgttttttcagttttgttttgttgcggcgctgtttgattttgctcgctcgcttctgaatcctgaaagggagccatacgccggcggcggcggcggcgtacggagaggcttcaggcgacgccggcgtgacggcgctgcagaagcacgcggcgttcttcgacaaggacggcgacggcatcgtctccctctccgagacatacgacggtgagctccccatctcgtttcacttgtgattttatttgtgaactgaacacgatttggtctgttcatgccgtgtcgtccttccgaattttcgcctcattttttatcctcatctcggatgcaccgcagggttacgagcactcggactcgggtctggcctctccagcttgagcgccgccttcatcaatggcgtcctttccccaaagaccagacctgtacgcttccctctctctctctttctctcactctggctaaaatgttactatctgaaagtctttatgtttttattactgaatttaaggtgctttattagcctgtaattacttgcagagaattcttgcttgtttacatcactacaatgatatgctgttttgaaagttgtcatcagcgcttaactatctgatcacataattctgtattaggctatcaacttcagaagtattgaaaatctaacccttccttgtacttcaccactactgtcgtaatcaggcctcaattctggataagttcggtatagacagtagggtgtgaattgtgatgtaggcgtgacatattgattaggattagctgctactatccttctttttactgtgatctatagctattttttctctaagattgttagaacgtctttgtacgtatatcgatataagtgatccatttcctatggcatacgaaaagagatgttcaattaatcgttggatcatgttgaattcacgcaggacaatggaacagcaccacgcttatctatctacatagagaacatctacaaggggattcatggaagcgattcaagcgcctatgattctgaaggaaggtaattaagctgcggttgcagactactttctgctttcaccttggctcttcaatttgacccttctcatccaaagatcattcgattcatttcacagactattttcactccggtgtatctatttcagtatgattgctaatatttcaagttttcaggttcgttgctgaaaagtttgaggagatattcgccaagcacgccaagaccgtgcctgatgctctgacatcggacgagatagacgagctgcttcaagcgaaccgcaagcccggtgactacactggatggtagtaattaattttctggctattaccactcaaaatattaatgaactttcatgtgatcttactactgtatatgctgctgttcttgctcgaattgaaatgcagggtcgcagcatcgtcagagtggaagattctgtacaagatcggcaaggacaaggacggccttcttcgcaaggaggccgtgcgagaagtctacgatggaagcctgtttaccaagctggcggcggcaaggataaacgacgaaaaccaagcatgattggtgacagctgatgggatcatctccattgattctcctgattaagcatctcaaatcatgtgccactgtgatatgagaacgattgagatgatgtctgaacacaaaaagatagtcatgcaagatagaagtatgaacaagtgtggacagaatctgcagatggggatggatcgtttagttctgtccttttttgttggtttcttggggatattgaatgtttatattattatacctgcaaatggttggcagtgcaaggctgcaagcaatggcacactatttatacatttggcgtcccttagcccgtagttgcccgtgatgccgtgatgcttgtcttatctgaactctgaaagtctgaatcagttagcagcattatcttcgtgtgtgcttggcaggtcgaagagcttccgttcctttctctacttgcagatcgtgatcgcctggtactgttaacaaatcgcagtgtttctatgctggcaagtcacgcacaaggggaacacattagttgtcaatcatctcatcaggtggagcttctatgcaaaatagttgtttattcagcgaattaggtgggttttctactgttaaatggcgcttagagatgatgaggcaaattaaacaaagtacatttaacccaaaaaaaaaacagtatgcaaaatcctacttgttctgttgtgcaggtgaagccgaagaaagtggtccaggttgaactgtgcaggccagctaatacagtacatatggtccatggactcggataatgtccatatggtccacgaaacgaatggaatttccatggactcggaccagtcaggcccacaattgttgcgctcagcccaaccgcgacatcgcgagacgcaaaaccgccggacgcgtgggcctgcacacggaatctcgcctgatatcaggcccatctcacgcgatccggcctacctggctcgcctcaaccgacgtaaattcccgcacgcgcacatgctgctctaaaaactcttccgctccagaggcttcacagctttctcctcccgtagagccaagccaaccaagcgggagcagcatggctacggccacgtcgacggcgacgagcgtggcggcggcgctcctcctctcgctcctcctggcgcgcgcgcggggcgacgacgactactcggggttcgtgtacgccgggtgctcgcaggggcgctacgcctccggcacgcagtacgcgtcggacgtcgactccgtgctcacctccgtcgccaacagcgcgccctactccccctacgccaacttcacctcgccgacgtcgaactcggtggtcggcgtctaccagtgccgctccgacctcccggcctccgtttgcaccggctgcgtccgctccgccatctccaggctctcctcgctctgcgcctgggccaccggcggcgccgtgcagctgcgggcctgcttcgtgcgctacggcaacgacacgttcctcgggaagcaggacacggccgtgctgttcaagaagtgcggcggctcgccgggggacgccggcggcgccgccatgcgggactcggcgctcggcgcgctcgtggccgccgcggcgcccgccgggggaggctaccgcgccggcgggtccgggggcgtgcaggccatgtcgcagtgcgtgggggacctcggcgccaaggcctgctccgactgcgtctcggccgccgccggccagctcaaggccggctgcggctacgccacggccggcgaggtgtacctcggcaagtgctacgcgcgcttctgggggaacgggggcggtggattcagcagcggcgccgccggggacgcgtacggatctgggcatcgcgtgtccggcaaccggttcgttctctccgtcgccggcggtttcttcacttccttggcctatatatttgtactcatgtagttactgaattacagttgcagtatgatcaatgatcgtgaactagactactagagtgcctgtgtctgtgtgctttatgcgtggtatgtaaccactaatcagcatatctgcatatgtgatgcgatgcaggtttactccttgtgcttgaacaaattaaacttgatgctttctaacttaaatggacttcttatcaagtttgtaactgtaaatttgatattctaaaattgcagttatgtgtagctcctcgttctaaaatgatcaatcatgttgatctgcatttgcagtagagttcctttaattcggtggtgctgttaaagttccacctcgtgcacaaacagaaactcacaaattgacatgcagcatctccctctctgtctgagcgtgtccacaaatgacaaaaccataactctaccgcgctaagtctagtcttgttgaaatttcactggccagctcagatatcataccttcagttgtttaatcgactaatcaccagtatctaacaattcgaacgtgctgtacaccaattagaacactgcagcataccctcctccacatagaccctgaatacctggtctgatcgtctggtgtctgaactgataatgcagtgctcaaaggcatgctactggcaagaagaccaaaagtgctttaattctcctcgcctttatctttgctctgagcttttcttgataggaaacttttgacatggacttgctttatcgttgtgatcactatgaagttttagtagaatatctcaaaggggattcaaatgattcagcttttcgcttgattagcattgaaatggagggatatcgctggtatccctcacattgcgagcagcgtagtgtggtttgctttttgtaagctttaggaggttaagctgccagccctttcactagttactaggcctgttagctactactttggattaagttaatcagtactactactatcccgctgaatgccgtatctgtttaagtttcaccgtacattattgtcacctctccagtataagcttgttgcaaggtcgccagcttgcatgctatgattggatcataccggtggctttttgctggaacgccgcctttccttttgctgtccttgttcttattaccatacatgccttctcttttggtatgcaatgggtcaaaggaatgaacaccaagcactagggctggatggaacaagctagagaaaggactccactccactgtgcttcatgtggagagaagatccagctagatcacatagctttctagccggcgatgccacccctgcatcggtagtggagaaaatttgtttgcaagcaatacactttaactttgttaggatagttcttctccttactttcgccgggagatagttctccatacttgttcaaggaagctagttcactagctgtttcaggctttcagcttggacatgccatttggaccagagataagggggagatagagaggtggggacgctgatatgtgagccctatatgctaactgttgagttaatcggttcgaccagatcaatgagtcatgtcaacaaatattgctgtaaatagtgttctgaaaatcaaattacattaacggttaggagatcaaatattcagtattagagttgagagatacaaatcagattgaacttatatttgagagattcaaatgaacttgctcctttcactctttcagtgcagtgctgcagttcagacagtggtaacgggcccacggcctggcccaacttggccattgacagttttagcccgtactggcctggcccaactgcacttccatccacctgatgtcgagttccagaaggatccaacaaaacggaacgtgcggtcgtgtcaagttccagccttaacagcgaagcaaaacatctcactttttttctcttttggatttctttctgccgtcatcttcgaatatccatgactcgcttgatctccaccgcccgtttcttccatctgagtcgtccacgtggctccacacgcgttcccatccggcccttcccgtacagccatgactcagccatcgggttcctcgaacgtgtcgtccggctaaatctggtgcacttgcctgcaccgcgtccacgagaaccgcacgagaacctccccctctctccatccctcgcatcccgtggacccattccacccaggagccctccgatccaccgccctctcctcgctaaaggcgaaaccctcctcgactcgtcgatccgatcccccatccccccccccccccccccccaaaaaaatccctcgcctcctcttcctcctccccgagctcgagtccgagagcctccgattcggcagcgatggcgctggagtgggtggtgcttgggtacgcggcgggagcggaggcgatcatgctgctgctgctgacgctgccggggctggacgggctccggcgggggatgatctccgtggtgcggagcgcgctgaagccgatgatgtcggtggtgcccttctgcctcttcctgctgatggacatctactggaagtacgagacgcggcccacctgcgacgacgagcaccactgcaccccgtccgagcacctccgccaccagaagtccatcatgaagtcgcagcgcaacgcgctcctcatcgccgccgcgctgctcctctactggatcctcttctccatcacctccctcgtcgtcaggctcgaccagctccagcagcgcgtcgacaagctcaagaagcgggacgactgatctgatcctgctacccctccctgattcagcgcgtcgactgacctgaccggtggcttcgctgtttcttccctactcgtttgtgttcttagatatatcatgtgatgcgtgttgctgtgtttttttgtagtatggatatggatgcttgagatcgtgatgcggatttgagcgttctattatttgcttcagatctagtttgagtaaattctggtcttttatgctacgaaggacatgatacatcaatttctccaaaaaaaaaagttgcaaatgtgagactctaggttatttttggattagtgggaataatagtttttacctgttttatcacgaaggtcgatgtgggttgggttttggtgcaaacattggtaaatgatgcaatgcaaactctctatatcttggaggaaagctccacttctggttttcagtgagttagggcatgtacttctgagatgttgatcagtgaggcgattgtttttgtgatgttagacattagaagtttgtctgattgtgagaaaattcttcagggggaaattgtgccattaccacatagtgccccttccactttgccgcaagttgattgcaattgctaatttgccacatacttgagcaattttcactgcatttgttcacggtaggcgatgaaatggtaggctgggccaaaactgataaaaaccagctgctacaggtaaattcatcttattagtagtgattctctctgtaaatcatttggtagagtccaaagccgtgatgatgttgtttttcctttataactcttccactctggtgattatcactatttacaaagtaagttggagcacatccctcgttatatttgctcttgatttatcctatgaaggacatgatacatcaatttctccagaaaaaggttgttgcaaatgtgagactaggttatttttggatcagtgggaataatagcttttacctgttttatcacgaaggtcgatgcgggtagggttggatcaagcttgtgaacaagggaattgcaacttgtttggtgcaagcattggtaaaagatgcaatgcaaacgaataagctgtttgcaacttattttttttaggattagctgttatactttacaccaaagtttgtgaaagtgttatcgagtgcatgaacttgagcacaacttgaagtagttaatcgaagttcaacaacttgagcacgctccccttttatgcaaagggttatatgcatgttctttgatgttcttgttaactgaagcacatttttatgtggtactccagccagtatctactgtacattgttattgggaacattcattggagtctattgacatgttccttgaaaggtatcctttctagattatggatttatgctggtttcttggaagatctcgttcggagtggaaacaaactgacttcttctgtcggatcgtgtaatgtacatgtttcaggtcagtaccagctcatgtatcgtatacttaggccctagttcgaataggaaaacggtagaaaagccataattaaacttcaagatgatatttatccttttatgtaagaaagtttttgcacggttttaaacaggttgaaatatatttggtaatggagaccgagggaaatctttagaacgaacggggccttaattttacgacaagagattaagggccacttgattgatgccaaaatgtgccgtgctattttttttatagtttgaatagtaaatatgatggtttggtttgaagcgaaatggatggtaattcccatacttaatctggtataattctagaattttcttcatcgtaacataaaatttggtttctaattggtacttcctctgtttcataatgtaaatcattctaacatttctccattcatattgatgttaatgaatctaaatatatatatctatctatattcattaacatcaatataaatgtgggaaatgctaaaatgactaagtatcaacctaaacacattactaagaattctatcatatcaaattattcgtagtgccaaaacataaacatgactaggttttggtaaagaaagccctaacactgcaaacatacaaacgtggcaccgtagaagatcgaaacaggatgccgagaccgactcgaaaaggctcgctggcctccgtgccccgcctggccattgttaacccttgttttataggccattgtttcaaggcccgcttggcctccgcgacaaagccgcaaaactacaaagtttgctgtttgcttgttctgcttttctacacgtgagagcaaccaggggcgtacctacgtgtatctacccggtgtcttcggataccgggtagcttatctatttctaagtgttttagggtcatattaagcattatatcactcaaaaattagtctataagcatatcaaggatccccggtaatttttgttctaggttcgccaccgagagcaacacgtcaaaacatgagcactgtcaggtgcttggcatgccgtttcctctggagatcgacgccttctccccatcctgctctcgggagatccaccactcctcctcatgccgctcgctggtacaagaggccgcttccacgcacggcggcggccgcgtccgtcgtcgcctctgcggccgtctggttattcggccatcaaaccaacgcctccccgagacccaatccgagcttgacatactgcagcgaggcgttcctagctcgatcggccctcccggaaagccaccccgacacggttcgggtgcgccgggtggccgccaacatcgtttcgacgacgctggaggatgcggtgttcgggcagcggaggctgtcggagaggatcgggcaccgcttcgtccccggcatcaactggagggtgcacgtcatcaacgacgacaagagccttacgggttgtttggagagcggtgagatcttggtcttcactgggttcctcaacgcgtactgttagaaggacgacgatttagccacgacgctcggccacgaggtatgttgttggcaaatacgcccccccccccccccccccgcattcggtcgtttaagaatgtagcaacttttaactttcatctaaacatatatttgtccatgtacgggaacatattctatgcacacaaacttctcgtgcatactctgtgtacaccaactagcaaatgtcacgaaaaattctaaaaaaatcatttactcctattcatattacacatatctagaaagtctcacttcaaattcactatattttaccgtaataaaaaaagtgaaaaatctgataattttaagggcaaaaatctgtcagaattttgtcttttttattatggctaaaatataatgaatttgaagataaaatttcacatgtaggtgcaatactatttgaagtaagtgtacaatcttttatagaatttttcgtgacatttgctaattagtgtgcacggaaagcttgtttgcatagaatatgttcccttcatatacatgttaaaagttgctttatttagttatggaaaaagtacgaattacccccaccgaactatcgcggtcggccgaattcccccctaaacccgaaaaccagatatgactcaccccgaacttttaatatcggacgaattaccccccctcaacgtaatctaaagcggttttatcctacgtgacgcacacatggcagcccagtcaatattttcttttaaaaaaacatggtggggcccacctgccaatatgctatctctctctcctcttcacctctctcactctctctctctctccctccctctcggtgagtctctctcctcttcccctctctctctctctccctctctctcggtgagcacggcacctgggatgcgaaggcggcggcgggcgggatgcggaggccgcggcggcgcgggatgcggaggcggaggtggctgcgcgcgggactgggaggcggtgccggctgcgcacgggactcggaggcggcggcggctgcgcgcgggactcggaggcggcggcggcgacggctgcgcgcaggacgcagcggcgacggcggctacgcgcgggacgtggaggcggcaacgactgcgcgcgggactcagaggcggggacgcggaggcggcggcggctgcgcgcgggatgcggatgcgcagtatcacatcgagcgcctcctggcggtgagcggcagcagcagcatgactccgactccgacgacaccgacgacgacgaggatgaggaggagggatccgaggccagctcctccggcgaggaggagaaggggcggcggtgggagaggaggattgggtactacgagcacgccgcccaccgccgttgcgacctcccccaagtgagacgtcacggcactgcccccatgagatcaccgtccaaccccgcgcgtcatttgcccgtccgccgctgccctccaccagccgtgctcgccgctgccgctcgcgccgccgtccgtgagagagagagaaagagtgagagagagaagagagagaaagagtatggcaggtgggtcccacatctttttataaatagaatgctaactggactgccacgcgtacgtcacgtaaaccaaaaccaccgcggattaggtcgaggggggtaatttgtccggtttgtatagtttggagtcaagaatgtccggttttatggttcagggggtaattcggccgaccgcgatagttcgggggaggggtaattcgtactttttcctttagttatagatgtagtactattacacaagattagtgtgtatacattgtttttatatgggcgaaggaatctccagtactccttccgtttcatattgtaagttgtttgacttttttctaagttaaactttagtttacagaaaaatatagcagtattttttaacacaaaacaaacatattatgaaaatatattcaatgttagatttagttaaactaatttaatattttatatattgctaaatttttctataaatttgatcaaacataacaaagtttgactagaaaaaagttaaaagatttataatatgaaacacaggggtagatgattacatacattaaactttcttggcaggtcgggcatgtcatcgcaaggcaccgtgtggagaggaagcggaacaaattttgggtctccgtccttgccaactttgttgaggagctcctctatgttccggtcgataggatcccgcacgctgagtgggtgtccctttttatgcggaatttcctccacaggtgacacctcgtatatgcatgtacatatgtataacacagattactcaataagcctaacgcctactgtgttttgccttgtgatcatcgtagaacggaactagaggcagaccgcatcggcctcatgctgcaggctgcggcaggatatgacccacgtgcaaacccgaacttctgggaggcactcatgaagtttggaaatggggagggtactacacatccaccgttgcagaggcgcgcggcggaagttaggcaggagaaagtgatgggggaggcattggaggtgttccgtgaagccgtacaacgacatgtgcatgcatagcctttaaggcttaagctcccttcaaagatatttctttttcttttctaagagagtctttaacgagaaattactaatgcgatagccgacatcatgaatggttatctcatggcatatggatgtttattatttcaatgttaaaaatttaaaatttgcatgtttatcacatattgatctatgttttcatatttagtgagtttgtgcttacaacataaggcgaattattgactttccctttttttctctgtttttagaccacgcgccttacacttaaaataggtaaaaaataaaacatcctcggatgaaacaaaattttaaacgtgatgatgaagatgtaaataactaggcttcacccaaggccaacatcgcaatcatgaacatagtagaaaatattagacactggacctcttggtttttcacgggttattagttggttgaaccgttgaaccgaccggttcaactgcaggaccagtgaattatttgtacatttattcctccttaacatagactaaaaatcagcgtgcccttgacccgcttgttagccttgttgtaaaagtcacacattaatacctttaaaaatatacactctattttttataaggcctcttagtgatattctaatttttagtgtagcatgtaataatattatagtgaacttttttttatcttaggcaaccagaatgctggtatgccttttgggtgtaaaagtataattagaaccaaaaatccaagatgattctatcacctaacagatactacatgattaaaatgggcgacaattttattttttatcttttgtaaaataaacacgctaggggtgcgcttactaatttgaaacatatatatacttcagtttcttttttggaattttgatatttttcatcaaatattttataaatgaaattgtgaaccgttattttggttttgacaaattggtacatatggtattgaaaaaaatatgtatgtataaataatttatttattatgcatagaaataaaaatatttttatcataaataaatataaactcgtatgcaatgttaagcaaaaggatagaatttaatgccatgtttatagtaaacgtcaattttgagaaaatatatgcaagtcaaatttaagattcaattaaattaattggttccaacatgtacacttgtaggtttgaatatttgaaagagcaaacatttagtatattaagagttctttttttttgcaacgcaatctgtaacataaaatccacaatcaagtttcctctttgcatctgcaagacctctttttatttccttttgttccacaagatttttaggcctactatggagtaggcatagtatatttgaagaaggcaaatgaatggaagtttgtgtgatttgtaaggggaagatagttttggagtaggcatagtatatttgatgaatttattttttttctcaccggtgattctcagattattttctctagtatgaattcatgattttttttcgtcaaagggaggggtgccatgtggacccaatcaaaaagttagcagaagagccaactttagaagattacccccccccccccccaatgtccacgtggcgttttcccccgaggggtcgggcccgtggataggtggtagccacccctccctagcccgaccctgggctgccccgacccatcgggacggtcaccacgtggccgtcatgcaagtgaggttaggtggacgcccctctacgcccacctaaccgcttttagtgcgggcagagcaagcgcaccacgccacattgaatgcggcgtgctgcgcgcttgaccaaattgtgaccggtgcgtggccggtcgaatgacagacaggacagcgggaagccacgtgcgcgttagcctggtgttaggcggcgtgcggcaggtatgccctgtctcgtcgcgatgataagaggcacaacgcctctcaaccatccgaagttggcttgaccgctttggacacactggggatcgtgttccagtgcgtgcgcgccggaagtctacatctattaaatggtgaatgacggggatcctccctgtgtcggcctacgtcagccgacatgatttgatgggccctgcacagcagccgatgctcagatgacttccagattgtggcacgagacaaacatttaatatagagaatattttccctcttcactgggaagcacacccggtgcatgtgggaaccccttggagtataaaaggaggtccatgtccagtgaagagggggatagaagaaaaaagaggtggaacgcttagccctagcttgtacaccagaaattcagagactttgtaaactcagaaaaatcatcatacacaggagtagggtattacgctttttagcggcccgaacctggataactccctagtgtctcatcttcatcgggggcccgactcccggccctcgatctctcccaatcctcctagttcctcaattttcactcgctgccctcggccgaactaacaaaggaggggcctcacggtcctccgctcgaggaggtcgtcctctgacatagctggtcatcaaggcgagcactcaaccaaaccactagggatattgttccctgatattattgtacatatacaattttttatcggtacgggctatgctgattatgttttcgtacatctctgatcgccgtgagctattgatcatttagagtgtgttcggcgctccactttcctaacttccacctatagttttttttttttgtacacgcttaacgaactgagtgtttttgtcgaaaaaattttatgcaaaagttgtttttaaaaaaaatcatattaatctatttttcaaaaattttttaaagctaatacttatctaacgaaaaattatttttgaataaaatttttatgcacgtgttattaatgatctaaaagcataggctaataaataaacagtgaaaagacccccaaaatcaacttcaaatttaatgttaaaaatttaaattttaactgataattataaacataactggaaaaataaggccgttagtcgctaaccctctatgccgaacatagctttatgaaatgtcaaccataatcttaggctctcaagcatgtatgttttgttctcttgtagttgtgtaggactggaagagcaagtgccagcagattctgtcagatcatgtaacgtagcctctatttttaaggtcagtaattaatcacagaccgtgcacttgcaaatttgtgaaggaaccaaaacatcggaaagatggacaaagcaccgcagaacgtgttcgaatcaaaagttccaaacaggatgccgagaccggcccgacagaggctcgatcgctagcctggtagtgttttggttaggagactacgtgggataggatgataccatcctgattttagagatggattgattccatttatttacttgtttggtttattggatggaataatctagtttttttatttggtagaagggatgggtagggatgggatgaatgtcgtttggagtaacgttagcaccacggcagaaggagcggagcggcacggcgaccggcggtgtgggtggaaggaggagcggtgaccagtggcgcgggcggaaggaggagtagcgccgacgtcagagacaacggcgatgtggatttgccgctgccactgagccatccccgccctccccgccttcggattcaccgccgccaccgccggggatttgccgccgccaccgccaccaagccatccccgccctccccgccttcggattcgccgccgccaccgccggattcgccgccgtcgcccgagcccgcatccggattctccgccgctgccaccgagccatccccgccctcccctccttcggattcgccgccaccaccgccggattcgctgccgtcgcccgagcccgccttcggattcgttgccgccaccgccggatttgccattgccgccgccgccctccccaccaccagatccgccgcggccgtcgcttgagcgcgccgtcgtcgtcgagcgagcgagcacgatgggcggaggagcaaagcacgatgtgagcgagcgagcggggcccaggtgcttggcttgtcgtatccgtgtgttttgagtccgctttgttccgctttttctccgtgtgttttttgagtcacaacaacacgagcactgcagccctaggtgcttggcttgtcgtctccttccacgcgttgcggccgcggcggcagtcgtgtcgatcggctccgcgcggtcgtctggttgcgcaaggagatcagcaaagtctccgcgagtaggccgagcttgacattgtgcgacgaggtgctcctaggctcctaacccgtgccctcccggacggccaccccgacacgagtccgggtgcggcgtgtggccgcccacatcatcgcggcggcgtgcgaggacgaggttttcgagcagcggatcggctgtcggagaggaccgagcatgtatagtgccgtccgcggcctcaactggagggtgcgtgtgatcaacactgatcgtggtattcggttggtacctcaggagattctgccggaaggacgccgatctagcagccacggtgctcagccatgaggtaggcttaggaatggacaggaagctcgtggctcgttagctcgctcggttcatgacaagctaggctcaacttagctcgactcgtttgaatttcctaacgagccaaactggcttcaaagctcgttagagattacgagctagctcgagcttaagtaattaatagaggtgcaacaattcgtatgactggattgagcgctaccccaaattgggccggaaattgcattgttgggcccatgagcggtcggcccgaaatgagcgacttgggcggcgcgcctagaagtttctcccgggcccagcgactcaccgccatatgccacctggcaaacctcttgaaaccccctcacccattccccgcagcgatcaaacgccgcccccgaaaaatccccaaaatacggggcaaaaatagaacaagaacatgaattacttgaagaactcgcgctccgtcctctccaggctcctccgccacaagcccaccggctgcccgcggctgccaccgtcgccgccgttgccgcaggcgcctcccgctgggtactacttcacctccccgagtcgcccggaggccgtccgcttcggccgagtgctcctccgaagcccgccgccgccgccgcggcctgcgcaggcgccgccgtctcggtacttctacacctccccgcagcggcagaaggtagtccacttcaaccgccggcgcgggtcccggtggtaccacgacccgcggaagctcaccacggtggtcgtcgtctcgggcggcgccgcggcggccgtctacttcggcaacctcgagaccgtgccttacaccaatcgcacccacctcatcctcctctcgcccccgctcgagcgccagctcggggagtcccagttcaacaatctcaagaaggagctgggccccaagatcctccccccgctacaccccgacagcatccgcgttcgcctcatcgcctcggaggtcgtccgcgccgtccaccgcggcctcgctggaaggcaccacgacgccttcgccgcggatgacgcctcctacggcgacatctccaccgacgtcgtcatcaagaaccacgaggccggcgcggaagacgtgatgctcggccggtcccgtggcaacaagaacgcgagcgtggctgccgcggcccagcgagacgaggaggttctggatgacagatgggtcaccgagagccgcgaccgtgggaaggcacggggagcacagccggagacgaggcatcttgatgggctcaattgggaggtgatcgttgtcagagatgacctcatcaatgcaatgtgcttgcccggtggcaagattgtagtctttactggactgctcaaccatttcaagactgatgctgagattgctactgtgcttgggcacgaggtggacttgggatttccgggttcatgtgtgattttggttagttgcggtggattggagatttggaactgacagttgtgccttttgttgtaggttgggcatgctattgcaaggcacgctgctgagatgattacgaagaacttgtggttttggatcctgcagattgtgatcatgcagttcatttacatgccagacatgattaatgcaatgtcgacgctactcctgaagcttcccttctcacggaggtattcacttcttccttttgatgtctttcgtggtggtttacagtctgcatgtggtaagttgcatttcatgggaatgagataagaagcattgttataagcttacaagcatttgggttcaagctccgactccctaagtcacattaaactagaggtctggtcaatgagctctcatctaggtcaaagatagtacttatatcctctgctagacctcaaataggtttgaatcatcattatcaaaactgtaattgtgttgattcagctagatagactagtatcaactgctacttgattaggctcataatttgaagatgtatattcctgcaattcagggtttacgtgctaacagtaagttgtcttgaaactaacagaaatcttatatttaaactaaaagaactccttccgcatgaaagttgaagtagaaaaatgtttttattcagtccttgtcccaagcaagacttcacaaaagacatcaaattcttttgtttccacactactttttggaatggtaggttacaatgtcatgtgtagctgcttcttttgttttagaattagataagattcaaatagcacatagcgtggattgtatgacacctactccataataccataagttgctacatgtaactgtgcaactattataactcctatggaaagaaattattgtttacagtgtactacaccttgaattttcatttatcgattattgagaagatgagccaatctatagttgagacagtggttttaataataaaaggcatgtttacgctgttgaattagggtaatgtcagtcactatgtcaagtccattttactccagttcgaagcatcagtcagttataatgttcaatgaggtggattaatatatacaaaaaaggataattgagtggttttgcaggagtaaaatttgaaaccaatgattgcccttcacatttatgtaaaatttgtcgaaacagctgttgcctacctttggctgcatagaaccttttgctttgcgatgagctgttttggaattcataccttccctgtttatttcatctgttacatgtttaaaaattgaaagcattggatatgccagaatcatttgaaattatttttttgggaggtggggtgggggcttgttgaggggggcgcaacgctctgaaccatattaaaatgggacgagtgttgcttcagttgagcagtacattatcccatcacacatcagtttaccctctccccaaattctcaatagttgctttttgacatgagcccccatcgtttggtcaaatatggatatacgccatatggcgtattagcaaaatattaataatttgtaggttaagcttttatatatatgttcttagcgacttaaacgtcaatgctgcaaaataaacttcgatgaaaaaacttcaaaattgagttttaaaatttaaattttggcattgtctgatgctgaatagaggaaacggtgggggtcatggcctagccagccgaacaaagctgttcccagacgttaccaagaagccacggagcatggcaatctcacaatagcacgacatgtacaccattcgtctattagcaatggatatttcatatttgttcatcttctgttgttagattcatgccctttattgattgttttaaacagtttttggccataattgtgtatccggaacaattatggttgtttgatcttgtcattgtttttgtgcataattggaagtcagtggtgaatcatgactgtctttgatatgatgattgatgaaattcaacataatctctcaataaggatcttgcctgaatttacttgtgcgtcatgcagttgtcagcgttgttattgtttgtctggatctcattcgatgttgttacctatgcaggatggagatagaggcagatcatattgggctgctggtacttggtgctgctggttacgatccacgcgtagctccctcagtctacgagaaactaggaaagatcgcaggagattcaacgttgagtaattacctctccactcatccttcgagtaagaaaagagcacagcttttgaggcaagccaaggtcatggatgaagcactgagattatacagagaagttagctctggccaaggcactgaaggtttcctgtaggttctatggcttcagattcagatctcaaaactctcgagctggtttcttactagtgccctaacaaaagaacacgctcttaccagctgcacagcgtcatcctataattttttggttgtttctttctgcgtctgagtgcttggtatcgccagttctgaattctgagggtaaatgtgtaccctcgttaccgaagcaggaagtcagctgcgtcatctgtgactaggaaagagtaaatactagtactacatttttttttgtgtcaataattgttgatttacagcacttttttttgcccccattgcccttcggttcgtcgatgttggtgatcagtccagtagctcttgttattaccaatctagtctaccaaatcgtggataattgcatcatggctggttagacttcagaaactggaacctttgatgtgcttgtgctgttcattcaatccataaacgacagcctatcaataattccatatgtaaagtactatgcaaccgatcaataatttcatgtgtggtagtagtaccatgatctggtcaggagtccaaattgcagcggcacctgtcgtgagtcctgacatgacgagtggtatgcacccatccaccgctcatctttctgtcgtagtaccagctcatatcagacacgccaacacgtcttgctttcatcagcagcaaccgaatattgtgttggattgatcggcattttggtgtcgtcttgatcaatccaaggctttctctatcttgttatcctactccccatttctgtctcttccgttggtgtctcccatggagcttgcaaattgctgttcttgtatcgaatacgaagacgcctccctcgaaaccagagtagtttatcataacctgggagctaattaagctcctagcattatacaagatagtgccactactaataccaaggtgccatttagcttttcgcagcacgaagtgtcacttgctgatttgttgctttcgtacagatctattgtgatcttgatgctgcagggttggacctggattaatcagccctttcggctattaaaggctagtgcccttcaggttgctgcttgggtcacaatgtcacatccatgctgtgtgttttttacttgatgatccagtttcagcgttggaagcaatgaagttcagggaagcgtgttagtacctgataagcttaggtgacggcttaaccatgcgagcttagccgtgtgagaccaagacactaaaaggttgaccagctaagcttaagaattttcatgtgaactgatgaagtgatgaagcgatgattacataagtgatctgcataacagagctgcaggagttggtggagatgctgaagctgaaagctagctgcaggtcaacattgtgaatcaacgtcaacaaaagaaggccataacaatggcatccccaggagtagttggattgttgaaagcattgaaattatatggcaaaattgcactgttggctgttgcacataatatattatattatacaataataatactactaatgatctcatttatggacctactctcacaaaacaagttatattgaaattcatttttttagagggagggagtagttttttttttaagacagagggagtacttatgtaagaagaagggtggtcagtgtcagactgtcactattgacactacatcaatggctagcgatacaaatgaatggcgatggagtgataggtggctaaacagtcgcgtaatcgcgctcaaccgctcatcgcaatctccgattgattccctccgctaaaggacaagcattctgtggaatctgttccgtgactctctctcgttcgttggacattttagtcatcacgatcacttgttcgtttcaaaaacagaagagaaaaaaaatcctaatagctttgcaaccattgagcaaaagtagtgtttctgttaaaaattctcatccatctaaaatgttgtctcgcaccagcagcaaaaagtgtagtactacctccgttttttaatagatgacgccgttgagctttttctcacatgtttaataattcgtcttattcaaaaattttatacaaatatataagatataaatcacacttaatgtactataagtgataaaacaactcataacaaaataaattataattacgtaatttttttaataagacgaatggtcaaacatataagaaaaagtcaacggcgtcatctattaaaaaaacggagggagtagtaacgcaaaagccacggctattggaagcccagcaagaactttatataaaggtgatcactaataacaatgatgataaaaccacatgtggaaaggaggacgatgatccacaggatgggacaagtaccgtaggtacggccattattggaggattacacaagagcacccaaacgcactcacccaaaagacgaagaaaaaggagctaatctaaatggcagatgagcaatgtagtagtagtggtagcatgcaaccaaatcgaaatggaatgagaattttttttggcgtgattttcttttttttctctttccttttttttttacttctcccagcacaaatgcaattcaccagatcgtccgatcaatggagcaaccggagcgacacggcgagctggggaggacgatgacgaggatgtcgtggcgtcaagaagccgcttcagggcttccagatgatggtggtctcggcgatcatggaggtgacgatgtaagggtccatgttggacgccggccggcgatcctcgaagtagcccttgccgttctgctccgtctcccggccgacgcggaccgaggcgccgcggttggcaactccctgcaaaaatttgtttgtgttttcatgatcaggacttatttcgacatgaaattcagctgtttttcatgaacaggacttgtaatttgacatgaatttcaggtgtttttcatgatcgggacttgtaatttgacatgaatttcaggtgtttcagaggaggaggaagaagaagacggaggcgcgtacccagctgaaggtgttgatgtcggcggtctcgtgcctgccggtgagccggcgctcgttgccctcgccgtaggcggagatgtgctccttgtgcctgagcttgagcttctcaatggcggacttgatgatctcgtagccaccatcgttcctcatcgacttggtgctgaaagccgacgtgatcgtgatcagcagagtagtataatatgaaagagtaacacaaaccatatcaatctgttcatgttcaagcatccctcacctgtagttggtgtgagcaccagcaccgttccagtctcccgggatgggcttggggtcaaatgagacgacgactccggcgatctcggtgatcctctgaaaaaaattaggggcagtggcattcgatcagaccgttctgaatcacaatttgagatattgatagaagaatgtcattatccatacctcaagaatgtagcgagcaacccacacctgatcaccggcagaaatgccgacagacgggccaacttggaactcccactgaaaaaccgatcacaatgttaataacattaccaattatagatctgatcacgatattagcatggtcagaaatgtactccactaattcaagacgatagaaatggcaaggtttgagagtagtgttcacctgtcctggcatgacctcgccgttgattccactgatgttgatgccggcatagaggcaagccttgtagtgggagtcaacaatatcacgcccaaaagacttgtcagcaccgataccacagtagtaaggaccctgaatacgcacacacaaaaagagtaagatcagtattagttaggtcacacttgaagattggtttgaccatatcagtttagtaattaagccacaatcaaacagacaaatgattgtacctgaggaccagggaagccaccaacaggccagccaaggggccagttgatgtccttctggaggagggtgtactcttgctcaataccgtacctataatttgcaagaacaaagaagatcaactaaccattatgagaaagggaattatgctgagatggctgtgacacgttgcgataatcattcggcaaaaaagattagtgggcataccagggctcctcagaagcaacctcaggggagctgaagatcttggcagcattgtgcctcttgttggtggggatcggttctccggctggcgtgtagcaatcgcacatgacctgtgaattacgataatttagaaaataaagtgccaattattcgagatggtgacgaaacaacccattggattcattcctcaactagccataaggttaggtagaacagatgatcgcaggagtcaaaaatacagtgaaagcgctaatcaagatcacatcccatgacatcagaaacaggtaaaaaaagaaaatttaatgttcaacagtgcaaaaaatagttcatcttttacacctgaagtgattaaattaagtttttccccccttcagtggtgcatctactagtacatcccatatgtagtttgaaccgaataaatcagcacacagtttttatagacatgtgctgatctggatgaacagagatggatgtacactgcagaatataaatcacatccatgacaaactgaaaaagtggtcaccacttacaaggatgttgtttcccttcctgaatgggtccttgaagatagcctgtgggctgcaagatggaagaacaaaaaattactgcttgcatccaaagtaaaaacataattaaaaaaacagagtttatttttttcactctgatttgccatgaaaagatacttactacaggatgacctcactgtcctcgccgggggcctggccggtgctggagccatcgtagttccacttgggcagcttgctgggatcagtcacagggccggagagagtctgcaccaccaaccaaccaaaatttaatatgattgataaaaaaaaaagagaatctaatctgtttaggagtagcaaggctctggatgataatataagcgcaagaacagctcagccagtggataacttggcagaaaaagtgataagacatatgagtagtaacaaacaggatcatggggtccttgttctgggaatcttatcttaccctagccttgctcctgagatccatgccagatccaccgatcctgcattaaaaacaaggagaaaaagaaaaacaccacttatcagttatcaccatggcttaatgagcaccaaaaaacagtaatcttgcgatctgaaggtggttaagatcgaaagctttgcatctttgaccaaaagtacgcgtgattaggggatgagatttaaatccatgcaccaaccgaacaagagagcatctcgccgtggccaaatggtggcgcagagaggaccaggtggcagacagaggctgccacttcagagatcatcctcccccaaaaggacaaaaactaagagagtactgctcgtactcgtaatctccatctctcgtcaagcgtatcaagaaaaccggggttgaacagtaatccacggcgaaaaaaaaaagaaacggaaaagaacgatttttactcggtggtgacatgaacaggagaaagcagaggagaggaagagaagaacaacaagatcaccaccgccgccgccgccgccgcttcagtcatcgagtggaaaagcgaaaagaaacgaaaccttctacgaatccgcacaaactatgaggagcacccctcccgaaatcccccgaaatatccctacccatcaaaaccaagaaaacaataacccgttcgtcgccatgaaaagaaccatcaaaaccaagagccaagaagagatccgaaaggaagaagaagataacaataatatcatagtaccatatgtactcggcgatgatcttctccgtggtgtcggagaggttgaggttgacgagatcggtgagagaagccatggcggacgatgaggaggaggaagcaagaggcggcacagctgtaacaaggagggtggtgcgagggcttggagatcggggaaggcggcaatataatggcgacgacgaccggaaggaagaaacaagttggcacgcacagtatactcgagtatatctgtatttttttcagaaaaagaaaatgattcttcgcgtatatctgtacctgtacagtatacgtacgattatacggttgaaccctagcaacaacatcccgcttttcgagttccggggataatatattcggttagtctgatcagccgcggtaggtgcgttgctgttacgtaatttttttgcacatgagggtgggtcagtattggctgacttgtggggccaggaggtgtgggtcccagatgtcagtgggtgggtgagcttgatgatgtttgttgcgggaaaaattatttatcccgagcggcagctttatcagcagtagtgggtgatttattatgagttccaagcatagaggtaaaaggaaaaaaattgttaaacttcaccgatgctttggagaggtccaaaaacgaaaagaattgaatagaaaaattttgttggattcaatcatcctaccaaaaagaccccactccctgttctttgtcgtgccaatggggtcgtagattcgtagtatcgtcatgggccccggatcttctgtcacatggggaaaataggagtaacacggatgctctaattagagaggtctttaacgtagtaatcgtcttttttctatcaaaacattggtaactgtcttgagataatattttgagagaatgctaaccaaaatgcaaaggtgatagacacggcgtgagatcatgacaccatctaccatactcaagtcatgatgcctatgagacatctttgtgtatgtgaatttactgagaaaatgattattatccgcctccgttccttagagcgtgtgttacaagtagtattttcaaaattgtatatgtgcaccttgtatgtgatgaatagaatagcactctctccattataaaatagagtaacccaagatatgattggacacaatctagtacaattaccaggtgacaagcaaggttcacatttttttaattttattttatttaaaaaaggaaaaacttgaggtttctacgtgggaggaaagcatattgcgaggaaaatttgaacagtttttaagaatttgaatttaaaacaatacaattgattagaattcattgaaaactatcatattattaagggtcgatgtcttacattcaataagaacccgtttgatacagctctatctctatctttcctgaagttgaagctcaatcaaacggtttcagctctacaagataaattgtgatgtggaattgggtttagccagcttcagaactttactttaaatttaatttcttaagttaaatttaaaagttaaaatcgtaccaaacgaaccagaaaggtaaaaaccctcacaaggcaccgtagaaatcacaagctggaaacgcacgtgagggcacggaacaaaaggcgccacggatcgatggaaggccagcacaccgacgcgcagtcgtacggcggccacagctttccctacacgggtgcggtgaatctctcctttccacgtttgatttctgaatcttgggcccattaattgctgaatctttttctgaaaagtaattaattgctgattccctgtatgtagtactcggcaaacttggtcaaaaaagtttattttagcgcgaatttatccaaccggaggtgataaaatatgataaacacaaactttaaatgctagtaccaatcgtgtttccgtggtccatttggtacccacgcgcacagaatcagctcaacgacttcgcatgcgcgctgtccatagttgaaaaataagtacaaagagacttctaatctcgtcccctcgtttttgcgtaattcgcacgaattgtttgttgtttttaatgcaaaagcgtttgaaaactgggggaaataattggcgagtactgaaaattggaacttttaaaggagaattttcagctgggatattattaatacagaattacagatcatttggccccatcgtttcatggtatatttgcaaatgaataataatatgtgaatatttttttatatatgtattcttagtgatctaaaagtaaaagctgaaaaataaacttcgatgaaaaaaaacctcaaaatcaactttaagtgtaaggttggaaatttaaattttggctgataattataagcgaaaagataggccgcatatgcatcaggatgagttgatgctagtatgctactgtagctcgtgtgtaaatctgcatattgcaggatgtgggagcaacaatattcctgggtcacatgggcattcgattctgtgatctcatccaggaagatgcctgcaggttgcattcgtctttttttgcaactggagctgcaaataggcagtacaatctcttgtgcacagtgccgcttttccccatggattgttgtctttacgattccgacaggctcttccgtttcggatactggcggaattcagaatttcacgaaatccggtagaaaaccggtaaattccgaacaaaattcataaaccaaaatttgaatacaaattcactgagtttgccaataagttctcgaaaaccggtcggttttggcgaaattccgatcgaaatcatcgaaatttcgatcagtaactgggcctagtacatgcaatctggcccatgtaagtgttttcttttttttaattctttattcttttctttcatgatgtaagtttcagtaaatacacacaatacatcatttttttcgaaaatttatgtcccaataagttctatgaatatcatagtatttataagattttattttatttttctttttttatcaattcaaatttgaatttggatgaaactcctcgaaatctcagacggtttctactttcgagcctcgtcgaaacctcaaaatttcacgaaatccgaccggatttcgtcggaatcgtaaaccctggttgtctcacaactcacaactcaagagctacagcaatcttccaatcctttttataatgcttaaaattcatcttaaaatatagcagcttttttatttatctcaatcaattataaaaaaaatatttatttttttcacctactttgttatttcaaccaaacccttgtttagttctcaactttttcttcaaacttttaattttttcatcacattgaaactttcctacacacataaacttctaacttttttcttcaaactttcaattttaatcaaacttctaattttagcgtgtagttaaacacaccccaagtacaattataagcctattcggtagccagttaggtgggctgcggtgtagactgtttctggtggctgctgtgcagctgcagcctaggcagcgaaacagatcctatatatccatttagtttccttagtatccataaaaaaattttagaaatgtttatattttagaatcgatgtatacacggtttagttgcatcagaatcaccctcttttcctctcaaaaagaaaaaagaatcaccctctttaattcctcaagtgctggatctatctctgctccaatatcgcagcaatgcggcctgactagatgggcttgcggttccaacttgcattggattgttttcaattaattaggccgtgacgacttgcatcgattcttgaatccttcatccttgttgttcgcagcgtcactcactactcacagatatacgcagaaagatttggtctgagcttttcttgtcaggatcgaccaggttatggctttttttttctccccttgtttaaatcacgatccatggtgttgaacctgctggccaatgcagccctagcttcgtgcctgcaacaaggcaaaaggcttgctgcttgcgtagtagctgttgacgatttcaggttaaaagagatgcacattctcttcgcgttaggtatgctctgagtctctgacagtgcacttcgacaaatcaaatatgctgtagtttctgccttttctttttcgaacgcgcaaaagaattgtacgtcaatatattagcaggaaaagagtttttgttacacaaagcaatcagccagactggcttatgcctaaaggggggacttgaagctagaaactactgcgacggttaaaaacgcaactccaaacagcgggagggggctattgctgtccatatcagttttggataatgaagctgtattttttttaaaaaaatactatatatacaactttgttgccctggatcatcacttcagtaaaagttcataaaaatgagcttcagataagcgaaggagacctcagaaattcagtggaaaaaaaactgtgggttcagtctacaggttgggtatttgcaattttcaggacggcgacaatcgcacttgtggacgtggtgtatcagtagtcgcctacacgctatatataccaaaggcaatgcatctgaagttgttctaaaaaataatgcatctgaagttcttaactatattatcgtacaggtcacatggaaaactttttgttttgtccgtgcacttactcgatcactgaatggtttagtccacaaaaaaaaacttccgacatctgactttaataaagaaaacctaaagattctgaaattctggcactaaactattcctgaatcattagtcaggaaatgacggtaggacactgctagaatgcatgtatatacaaatataaacaacagtggctaaataccagcaaaaatagctggaaaacagaatgaaagcaatgtaatttggcagcaccatctctctagcgcaacaggcgattgactcatgtgcaagccagctataatgtcctgcatatcataacccttgtcaatattatcatcaatggaattgctgttcttttttctagtattaatcatactttggagtcagctaccaaatttgcttcgagacattgaactttcagttgcttttcatcagcgttgtcgccgcatattattcgcacaccagagaacgctgcgtgctgcgtctgcgtgccatgttctagatcaggatacgatggattgttcctccagaatacccctaaaaaaaactgaccggaaaaacttatgtttttaacagttgacctgaataaatccaacatactgactgcattatgatagtaccagcaagcaaggagttcataggtgccacctaatgtcaacttgctcagccagtaagacgctcctttcgcatttcctctgaacatttttttgtttcttggcagggagaagagatcaaagatgcgaagagtaacgcaacatacgtacgtgtagatccagattccgatccctttcaccgaaccagcgagcctatcaacgacgactccttgccgccgtcgccgtcttgtgcagcaatgatccgatacgcttcgtcgtcgtccacgctgtcgaaagctacggcattggactacttgatccgagacaaattgtgggtgattgacaacttgggttcagagtgtccaactagtgcaaggttgtggcacagtcttgtgaatgtttaaagtcgcttgtacctttgtttcacaggaagtcttgcttttcgtctgacgactgacctgtgtatttgcctcaaagtcttcaggtcgtcggtacttagcactgacgattgtaggctcaagtcctcagattctagtgggaaattaagcaatcgacttgatggttgcagttcgtgtgaattacggcttggatccacttatgcttagcatcggtaatgcataccgtttgcagatcgttcgttatcgcttgacccgtattctaccacctgcatttccggctacaaacttgggagactttcagcgatccaagaatctttggggcgtacgtgcggttaaaattcacgtaggaatcaagaatatagtaggtgggcttaaataatggatctttgattaggtttgtgataatgactctggcctcggtggatcactcggctaaacaagaggttacggaggccttatcgctccctccatggccccatccaacaaccaactcgtggattgattgaaatccgtccggcgggcggcggctacgaacgatttccacgtaactatcccccgtttgaatcgatcggcagccgcggaaagtccaacctgcttgactgcgcttgcatttgcagcagctctcgccgtctcgcgcaggtcgaacgggcggcatggcggaaaaaacgtacgcgcgcgcctacgcggttggggttggggccgcgtgtcacatgggtcgcgaggtttgcaggttgggaagtgggctctgccccgccggtccggttaatttcacgctgctgcgcacattaggcctacgagacacacgccacgttaggcacgctgtttttcttttcgatttttttctatatatttactatcgttgtcaaatacaaatgcagtgtaactaaaactctatttcttataatatattgacgtggaatccttttgcacgttcaccaaaaaaaaaagacccatgccacgttaggcacgctgtttttcttttccatcttttcgctatatatttactatcattgtcaaatacaaatgcagtgtaattgtactgtaatatgtaattgtaagtgttttgcaggtgagggagacgattcaatcaaagagcaagaagtgagggatgagaaatacacttattcctgttttaactacagtgggccccgattgcccaccagacaaccgagcccgagcaaaaactaattaatgggctcaagatatgatggcccacccatacagatcgaggcccaggtggaacgtcgcgtgggccacgcacccgtgcgcgtagcggacttcgttttgtcaaggcccacacacggactccgactcggattcccgctgacctctcgtctatttattgacgaagccatcagggagagggatctacactacacacgtctcctctgcgtctgcttgccgtgcggtgcgtgcatcgatcatgggcacgccggccgtcgtcgacgacgacctccgcgagctcatcgacgagctgatgaacacgggcccggaggacgaggccgacgaccgagatttcgaggaatccatggcgacagttttatctatggtcaccgactatctcgacgaccccgaccctccctcgccggagctggcggactgggcagccgccgcagagtccggcgcccagaaggtggcggatggcttggcgtcccgtgtcgagaacctcaggaggggcctgtccgtgttcgccgggaccggtcggcccgaggaggcggtgctccggaagcacgccgcgtggaccgacgcgcgccgcgcggaggcggcgggcatcgcctcggccgcgcgccgcctgcgggagaaggacctcaggagcctcgcggctagaggcggcctcgtcaatccgaggatggcggagctgatcgcctccgtaagcgacgccatggagtccgacgtccggcacggccacgtcccttcgcccgcgcagttggccgaggtagagaggctcgagggccgcgtcgccgtcgcctcggtcagggccatcctgttgaaggtgaagctcacgcggggcgcggccgcgttcgcggggaggcccggcgaggaggcgctcgcgcaggcgctgcgcgggcacgccgcggccgcggaggcacagcttgcggcagcccgagcgttcgccggagccttgcgccgcttcagggctttatctgcagacgctaacagcaacccaacagcaactcgagtgcacaagcggccgtcgccggagacggaggacgatcttgcagcgccgccgccgcgacagaggcgccgcacgttggacagtggtgtacaagactagcttattaatctttttttaattatcgagcttaggagaattaccattgagaaaaaaagatggtatttgtacgtgttctacctctttgttaggagaattttacaattgagatgttgaccctctgagtgatgatgtcccttcacttctgagagcgctcgttccttttgggcctgtacacataaacagaaaaatgagccggaaaaatttggcactgtaactgaacggtatatattgatacgaaagcatatcatatattctcacttcccttccaccatgagaagcagcaggatcaacaacggatgcatggtagacttccccgtagtggagtggagttgacatgacatggccatacgtccagtagtagtcatctatttaaatgctagcattctcctggataagtatgttagcaatgtcgatgtgtgggtggttttttttttcgttttcctggttatagcctctcaggtaatcttatattttttttcctattctattaatatgaactttgcactagtgcgagtcgttaaaaaaaaaacatcatgcgcaactgctcgatctgcatttaaaattcaggtggctcaggttgcagttgacttgaaaatctggaactatatgagagaagctctgtgctcggacatctgaagcaagcgatgagcgcggctttgctggagaacatctctgcaaggaggcagccgacggcctaaaggtcggatgccgatgcgcggtaccagagcgtgacaatccggctgctggtggtgagcgagcgacatttgttgggactgtagtaaagttgcctactacctcgcacgaccttcatcccacgctcacatccgcgtcactcgccggcggccagcatgagcgcggcaggcaccaccaacaggcaatgccggtgattgacatcgtgtcaatctgtacgtatgctctgcggaattactgtctgatgttgccatcgtctaattcccgaacacggcaatgtctcaacctcggcagcccaaacattcacaactacagtgtgatccgatccaagacttgcataagccaattataattcgcaaaacctatttcacacggttttgccctcgcgcggtgcggctagcagccgtccgatcgcgtgcgtcgtcgtggtgtccatccgcgcggcctctcttctcatggcatcgatgagaaggatcgagatagcgtggagcctcattccaactgaactgaaagagggaccatacgactatacgagtggtagaatatgtgtcgaatatactagtcatatttggttacagttgaacttggagttgtaataggtggtaggaggtggagttagagtcagactctataaaccggcatctctcttaaataaaggagggcatcacaatgtaagcatgtcgactacaatgtagcgtagacagaggatggcatcaaggccatgtacttgtagcagctagaagctatattggttggagagaagcgtccataatcagagccctggggatataggcctcagctgaacctcgttaacaaatatcgtgcgtttctgtgtcgtcatctggcgtgccttgggtgatcattgattgaagcgatatagaaggttagtcgtcgttccgctatatcgactaacttttataacaagaggtatcagagcccagttttggaacccggaacaatttccatgggtcacatggtggggaggccaggtaacaagtcttcggagtcacatggattgatgtgacgggggagattgttgggtttagtcccacatcggtaattgatgatggaggagcacgacttaaaaggtggaggtggtcctccttcatcggactagtcttttgggttgtataggcctagaacctaaaattgtggctccggttagatctatggtagagcaagcctaattgtgacctgagaggcccacggatagtgggctgggctgcgcgctctaataacgagaatgaaagcactaggaggtgagaaggtaggggtgacggggtttctgtagcgatggcagctacgggtgctggattccacagcggccgcttcagtggcgactttgaaaaaaaaatgataattacaacacataatatgtgtagcaccctaactaacttaggtataaagttatatatttttaatacacttatatataagttatatagtgcttataatatatttacttatatataagttaaaatgttcaaaagttatcttcaaatatggtaacttcgggaatgctctagaggccgggatacagcagtgctgcggctacgttgtacactgcaacgagcacaggcacaaagcatgggacggatggagtatttgtgtttgctttgctactgcagcacagcaacatatgcaagcaatcgaacagggccttctgcacctacccattatttcgacaaataacaatcatctcttatttaatttctccacaaattttcttatctcaacttagaccttgcttagttctaaattttttcttcaaactttcaactttttcatcacatgaaaactttcatacacacataaactttcaattttttcatcacttcattccaattttgtagcgcccgttccgtcgtggcgcatagcgggaaaattatctcttaaaaaccctaattgcgaaatttgtttctttgcttgttgtctagtgtccgtgccatctcaagatctcaatccccgatctatcgtcgagttcaattccgaatccaatccctccaaatcaaattcctccgcaaaagtctagtttgcctcccccaggttcgatgggccgatttccgctcggcccatctctcccctggccccctctccccgggcgctctccctctctctctctctctctctctctctctctctcgcgcgctctcccccccccccggcgcgtttcccccccccccccgctcgctgctcgcgcgtgcgagagccgcgccgagcgcccccctcctctcgcgcgagctccccgctcgcaaagccggccccgcgcgccgtcgctcgcgcgcgcgcccgcgtggattcccgcccgagccgcgtcgtctgcgccgtccgcgtcgcccggtcccgctgcccagccgcgccgcccgttgttttcccgcgcgcgcgtgccgagtggccgaccgcccggtcgccgccgccgtcaccctctgccgcgccagcccgcgcctgtcgcccgtgtcgtcgcgccgctccaaaccgccccgccgtcatcgccgtcgtcatcgcccggcccccgccactccgcgcgctagcctccaaggggcggaggcagagagcccctctccctctgccgagtcgccccgctccctcctccttttcccgaatcggcaaaggggcgagcccctttctctccctccttttcctctttttctcccctttttcccctctcgccggcgtcacctcctgtcgctgctttggacgctagccggagcgccagctcgccggcttgaccgcccatgtcggttcccctctctcaaaccgacattgccacccttttaaacccgtcttccccctcccttcctttcctctcccattcgcctcctcaccgttgtcgccgctcccgtgctctgcctcgcctccgccgtccatcgccaagtgccgggagagccggtgcgttcgtggacgcggaaggggactccgggcgcgcccccttcttcctcttcctcggcccgaggccggagagatcactcccgcgccgtcggcctctcgtcactgcgccccgtcccgcacggtagtgtctctctccgttcttcatcctcgctccatctcctccccctagctttcggtagtagcttgagtagactccccgtagttagccggcgccgccccgaccgttgccgtcgctcgccgtgtgctcgccgccgtcgccgcccgagctccgtagcacccgctcgtcgccgcccgagctccgtagcacccgctcgtcgccggcctcactcggcgtagttccgtccaatccgacgctagcgtcgagttcccgaagccgcgtagatgctctcaccgccgggaatcgacctctcgtgacctcgttgccgtttccctcttctcccgccgccggttgccgccgccgcaatccgccgccgtcgagcaacctccggcgaatccgagccgttggctcgcctccccttgtcacgtgcaaccacccggtgtgctcgctgttgcccgtatcgccgtggttcgctccgccgctcgccgccgccgcccgccgtccattcgcggccgggtcgtcgtctacctcccgccggcctgcgtggcagccacgtaggcgccacgtcggcgccagctcagccagaccgggtcgggccgaccccggtcggtccttccgcgtgcgcgcgatccaccgcgagccgtgaggctgcgcgtgggcccgccgcacctgcgtccaccgcggaccgcgcgcatgcaccgcgtcccttccccgcccgcgcgcgtgcaccgcgtgctccctccgcgcggtgagccgagccgctgacaagcgggtcccacccgggaccgcgcgcggtgagcccggtccaccggtcccctctctcctcccctcccgcgcgcgctctgggccgccttttgggccggccggcccattaagctcggccgaaccgccccaaatcccttgggccgcaccctagccgcccgaggaaagtctaaatttcctccctcctttcttttctttttcttttccaaaaaggatttaattaaatccttttcctttaggccaaaaattcaataatcttagaaattcaatatcttcccaaccgtaaatccgttgactccgttcaacttccaaaattccccaaatctcgagatctatctaatggcacgcttagaggtcattaatagggctttatttttcgccgtttgttgagttgtcccgtttcgcgtgtagttccggagcccgaagacccgcagtgcgaggatttcgaggatcaagctccaggtctcgagcaaggcaagccacctttgaacatcttgagcctatatttgaaatttaattatgttgcttgaaaaatattatgcattgataggatcgcacttaatctgttgtcccgtctgcaaggcagattggcggacctacctaatttgttgcatttgatccttcctttgataattgttatatcgtgtccccttgtaaccacccagttgcgcctcgatattcgtgcactctgtgcgagtatcgacggtcgccttcaaacttaaaatctgaaaaacaacttgggtaaaacttgggttttacaaaagatttggaaaacccgacacctgggtcggtgcttgcgaacaaaatgaatttctaaaaccgcggaccggggaacgtaccgggtgtacggttttcccgctcccgcacttaaggaccgattccttggaatttcatccgaacataagacaagtacgaccacatgggtggaatgggacacccctggctgagtaactagcttatcaggggagccatgatgccgagagacatgtggattcgtcggggtggtgtcggagaggaccccccctgggcttcctggcacagtatggtctgggacctaacctgttgttggtctaggacccctctcgtcggcatatggtaagcctgtgtcggctttggaaatgccttgtcatgaaagcttggaggtctcccgacgtggctgatccccacgggctgggtgatccgggttagtaatgtcgtgtgggtaaagtgtaccccctctgcagaggttaacaaactgttcgaacagccgtgcccacggtcatgggcggatgtgaggtgattcctagcgtagtttggtttaactactgcttgtgaaattgctgtgtgaaaaggggattggtgtttgaaaaatctgcagctgatgggatcagctaggcccgggtggccgtttgaaaagttgttggcccgggtggccgttgaaaaagctgttggccgggtgccaaccttgtttaaattctaaagactgataccttgcacgtactccgaccggacgggacgcactgtctcaaccgtgtcgtttgagaagcactcacctagatgtttttagaaacgagttcaaataaaatcaattacgaaaacaacagcctttccttgaagcctgcattaaacacttatttcccctggcttgctgagtactcccgtactcacccttgctctatataaatatcccccccagttgctgatgaagatgaagcggatcctgctgatgaggagttcttccaggagcaagccggttacgatgagttttagggtttcggcctagttcccaagtcgcgcctgtgatgattggtccaagtcctggcttccgctctccttttgtaatgcagttgtgagctcgggatctgtccgcagcccaacatgactgtacaactattctataataaagagacctccgttgctgtgatattctgtctccctgtgataccagcactgtttcctgggactggtatcgattaacaggttaatttggagcgtcacgggctagttccggtcgagactagttcggggcgtgacaaatttcaaccaaacttctaattttagcgtgaactaaacacacccttagtacaacaaacttcatttaatttaatccactttaatcacgacgcaaaatttcaaaacttcccgctaccgatgtacaactctaaaattttctatattttaaaacatagataatatattttagtaccatttctttaaaaaaaccagagggttttctttgataaatgataactacacgtctacacgcgcttactttctttcccctttttctaccctataattcaccaactaccacttacatccttcatacttcattcatcaaatctaacgctctgtattcatctacatccgatcaaatggtttggattgccgccctctcttccgcgcatctctcacgtcgtaatcgccacccgccttgcgcatcacaagaggcggccctctgcgcaccttggacccgcacgctccccctcccctaatctctctcgcacaccagacgccgccatcgtcacctcgcatcgccgcacaccagacgttgatgatgtcgtgacccctcccggccgcctgatcggctgatctattcttcaccccactccctcaacgccgccatgtctcaggacatgaatcgctgccactccccccgccccgcgcccgagccctatccccaaacctcagcgtcctccacccccgcagacccctcaacctcccaccccaaaccctagaaccacttacccgcattgtcagcgacgagccaacgaaccggcgagggaggccggtggcttagccggcgtagcagcgaggaaatccccggctggtcgagcgccctggcagcgcagcttcgcgcgagatcttgtgcagccaggcgaagccttcgcatcgcgtgcctgcagccatccccggtaagttgctgttaatcatgatttgtgtgaattactcgttatacaatgccacctcaattccctgtgacttgtaatatcagtagaaatcatttattaacagcatttttctcttttaaatcatgcaccaacaccagtattgctactttctttagtagcactcagtatggtgaatttgattcacattattttcagccaatatgtttggttgagtcaagaagtgaattttcaagctctctacttacatgatagggagtaatatattccacgttattgtacagcccatgtgtcaacttattggaagttttggaagtgaagcaggcacatggtaacagtagcttcgaggtatttttcacattcaacttatgtacacgaataattctaaaagaaattcaagcgcacgttcattcagtgttgagtcatttcgtgctgattttccccttagcagattgaggatgctatttcctatatttaggtttggctacaaatactgaaaaaatgatgtgattttccattggataaatttgaatatctgagctgctgggctgagccgctgctcaccgtcactgctgagtgtttcttcacagtttagtttacgtgtggctttgtatgtattaggtgaaataaatcacctataagatctgatctttggaggataatatcttatgttgaagattattatactgaaattctgcgattgctttgcacctctgttccctaaaatatgtgattcatttgaatgccattaattcctagcagtatttgtgcaactggctgcatcgaaaattatattttgtaagatgtttacatctgaaccccctgtacataaaacttgctatttcttttaaacccaatcaaagattctcctgatatggaggtacaccgtacataaatatatttttttctatagatcatttttctaaaggtgattgatagcgtggctgttcttgctatatcaatttattgttatcggataaaacacacaaagctggaaaactagggatgcacgttcaaagactggaaagtagctgagaatgttgttgggtgatcctcgcttctgcagttttttttttcttcaggtgttaagatcctttggttaattttggttttgaaatgcagctcaaaagatcaagtcattgtggattgcagaatgagagggtcacgttttgaagtaactgcagtcagcatgaagctatctctactaggatgggagaggctctctagtcttaggctgtgttagagggagaggagattgagaagattgaaaagatacgtaaaacgagatgagccattagcgcatgactaattaagtattaactattttaaactttaaaaatggattaatataattttttaaagcaactttcatatagaaattttttataaaaaaacgcaccgtttagtagtttaggaaacgtgcacgcagaaaacgaaacaaacaaactccctttttctccaaacgaacacagccttaatggacacacacgcttactcatctaaacgtagcatcagatgacggatccagggaatataattactcgaaccaggcaggaagcccgactcaacacaagtgagtgggtgacgcgacgatgctagcccgatgcgcgtagcgccgtagcgcgaccgtccaaaaggctcgtgctatcgtgccggttggttggtgctttggcccctgtctctcctttcgctttcccacgccccccaaaaaaaaaacaaagaaagagaaaagaagaagctacagaaaaaaaaaaaaaaaaaaaaactagcagcagctgcagcttagctttaatcgagtccacccccgcatcgatcaatcagtgagcagcgacaggagtagcacgacggcgagctcgcacacgcatcccgacgccgccgcgaggccgcggccgccgccggcgacgatggatctcccgccgctctcccaccaggcgctcttcgccgccgtccgatccgcggacgccgccgccgtcgccggcctcctggccgacgccggggcgtccgggcccaccacccaggcgctcgccgccgcgcagacggacgccggggagacggcgctgtacgtcgcggcggaggccggctccgaggagatcgtccgcctcctcatcccgctctacgacctcgaggccgccaccgtccgctcccgcctcgacctcgacgccttccacgtcgccgccaagcaaggccacaccggtgagcgcgcgctctctctctgcctgctccccgtatgattcgagctgtcttgcaattgattgggaggcggaaagctttcctgcgattacctgatgttttgagctcggtagtactaattctagctgagcgtggcagttcgtggtgtattaagctggaaaatcgggatcctctgttaattgatttgatctagatagtttagttgtttgatgatctgaacatcactccgattgattggctatgtgtatgacactaagcttatgatagaggagctctcaaaatttgtggttgtgggagtgttgacatagtggttatttgttctcatattaattacagagagattgatatgtggatagccacagttcatatggaactctgtttgtcatgttcatcttttttttgctcgaaaagttactgttgaacaaatgcataatacataactgcaaaatgctgacaggggctgtgaaggagttcttggggcggtggccggagctatgttcaatctgtgactcttccaatactagccctctttactctgcagcagtaaaagatcacttggatgtagttaacgccatactggacactgatgacagctgcataaggattgtgcggaaaaatgggaagacatcactacacactgctgcaagaatcggttaccatcgtattgtcaaagcacttatagaaagggatccggggattgttccaatcagagataggaagggacagactgcacttcacatggctgtaaaaggtaaaaatacagatgtagttgaagagttactgatggctgatgtttccatactcaatgtgcgtgacaagaaggcaaatacagctttgcacatagctacacgaaaatggaggccccaggtataattctttgctaaaaccatgcactgttagtctgttaccttgtctgttcgtttgatgtataccatgcctggagaatgtatagcagtgtcgtttctttcatgcgttctcaaattttcagcgtattagttgatttatttataccatatgtgtccttgcttttcaatagctttgccccttagttgatgcttcgttactggaacacaactaacttactccgtattaagatcacaatatcctcctagttacagctcattcagtgattgcattatcaccaaaacttcagaagttccatctattcatgaatatttggctttgtggtctagctggtttatgcactaaataattgttcgtagacatttggattcagactggtggaccattaggatgatattagtacaagatcagcaatgaggtaacaacagagtgtttagtatgttggaggatatcacattactatgtgtccattaagacagcaaagactaaagtgttttttagagttgttgatctgaagcttagtttgcatcttaagtgcacttttttcttgtggactcatggaaatgtggtgcttatatcccagcatttttcttgtctcaatcatgtaccaacattttttatatatatgttccctttttttcctccagatggtacaacttctgcttagctacgaggcgcttgaagtcaatgctatcaataatcagaatgaaacagctatggatttggctgagaaagttccttatggtgagtctaaaatggaaataattgagtggctgacagaagctggcgcaaagaatgcacggaatgtggggaaaattgatgaggcatcagagcttaggagaaccgtgagtgatatcaagcacaatgttcaagcacagctcaatgagaatgccaagacaaataaaagagtgacaggaatagccaaagagctccggaaactacacagagaagctgttcagaacaccatcaattcagttactatggtagcaaccctgattgcctccatcgcattcgtagccatattcaatttgccaggccagtactatgttgatagggatagtgggggagacattggtgaagcccacatagccaaccttactggtttccgagttttttgtctgctgaatgctaccgcccttttcatttcccttgcagtggtcgtagttcagatcaccttggttgcctgggaaaccggtgctcaaaagcgggttatcaagattgtaaataagctgatgtggtcagcatgccttagtacatgtgcggcttttatctcattggcctatgtggtagttggcccccagaatgcctggatggctttcaccatatcagccatcggagggccaatcatgattggtactctcttgttcctggcctatctgttgttgcgccctcgcttcaagtttggtgaagatagacagcggcgcatcaaaagggcaagtggcagcaagtccttctcctggtctatccatgaggggatatcagacctggaagcattctctgatcatgagaagagaatttatgccctgtagattgtaaaaggtcttgctttagctgcatgtaacacttaagaacatgtaattggatgaaaacaatcatccctgtatatagttgctcagctgttttaggtctgtggtgaggtggcccaagcagacctttttctgcaccatcttgatggtttgtgtacttggatacttggtacctgctaatgtgtactagtattagcacttaacaatgaagagcacctatgcagtttgaagctatggttacaattccatccatctattgaggatcacatgtgctggaaatctttgacccccccccccccccccaaatgaatccttcccaactgaagtgaaactttgttgttgttactctagaaaaaaacagaggttgttttcaagtaattattactctcctgttttaatgtataatagtaccagtgatttttcacctcaaactctgaccaataatatttcttcaattacttattcaagtaaagtgaaaagagtattaactagatttggcatcaaaagtattttaaatgttccttatatttttgtccatttgcacaaatatcctaaaagaaatgaatagtcacataaacttaaaaatcgacggtgtcatatttaaaatcaaaggtagtatatcggaactgaacttcatcactcccatgaatttcttgcaaaaacatcgctattccaaacagttctaacttcgtactctctttgttacaaaatattagcaacctaactggacacaacctactattttgaatctagataaggataaggttatgttcaatctaatactagtgtgctatatattttaaaatggaggggtgtgttttatttatcttatttatttcatctcggtaataatgtgatttgctacagcgggcaaaattttcattccaaaggcagtagatttggtcatttggccactagcactcggtgaaatgagagctccttttgagcggcttccgagccggccaccaaacggatggattcttgccgcctcctgcacccttatccacagccgctccctctccctccccctccccctcccccgacctctactcctcgacctacccacctccaatggggtgtcctccgccgccgccgccgccgccaccacttcctccggtgcgtcgccgcctccgctgccaccctgcagaaggaactcacggtgccgcgcaccccaacagccgcgcagagccccggtccagtgaacccgcctacgctgttcgacagaatgcccgagaggagcgtcgcgacggtttccgctgcggataacctgctcgacgaaatgtctcggacgtgcggcgcgggccagcgtggtcggcctctggaggcgcctcctcgggacggcggcgggaagagcgcgagcgccgcgatcgtggcgctggcgcatgccggccggcacgcggaggtcgtcgagctcttctgccggatgcggaggggcggcgtccccgtaagcaggttcgtgctcccgagcgtgctcgcggcttgcgccggcctgcgggacatcgggatgctccgagccgtgcacgccttggtcatcaagtgcggcctgtgccagcatgtcatcgtgggcactgcattggttgacgggtatactgattttggattggtggatgatgcgaggaaggcgttcgatgagataacagacgccaatatagtttcttggagtgtgctcattggtggctatgcccgttcttctcggtgggaagaaacattggatgctttctccgcaatgcggcgtgctggggtgcttccaaatgattctgttcttgtaatggcgattcaggcgtgcggtgcattgggacgcctggtacatgggaagcagctgcatggcttagcagttgtccttggatttgataggaatgctactgtttggaactgcctgatggacatgtatgggaagtgtggtgacattgacagttgcaagatggtttttgagacgatgatcggcagggatcaagtgagttggaacacgctaatctcaagttatgcccgtgttggtctttgtgaagaggcactcgacatgattgtgcagatgcaagagtctggttacattgtcgatcgcttcacccttggcagcggagttacagcttgtgcccgtttggctgatatagatagcggccgtgcattccatggttatttggttagaagattgttggatactgatgtcatccagggcagcgcgcttgttgacatgtatggtaaatgccacaacatggaacttgcacacattgtattcgacaggatggatgagaggaattatgtatcatgggatgcactcttgtctgggtatgttgagaatgagcaggttgatttagcacttgagattttccggcaaatgggttgtgcaaacataaagtataaccagcataattttgctaaccttcttaagctctgtggcagtcagaggtataaagagtatggaaggcaaattcacgggcatgccattaagaccataaacaagatgaatgtggttttggaaacggagcttattgacatgtacgcaaagtgtggctgcattgaggtcgctcggctactatttcttcggatgaatgagagaaaccttatttcctggaatgccctactttcaggttatgcagcagatggacagccagttgcaacgataaatatttaccgccaaatggagctggcatgcattaggcctgacaaatacactttggcagggcttttaagcctttgccggtaccaaggactattgcattatggaaggcagatacacgctcatctcatcaagatgggttctgaaatgaacgtggtaatgcaaactatacttgttcatatgtatatcaagtgcatgcgtcagcaggatgctgaaaatgtttgtataatgatcgaagaaaggaattcatatgtgcttgatgcattttcaaaggtctatggagatgactacttgatctgaagaaaagaaaatatctcattttacactggagttagaatgtatgggaatacttttgtcttccttgtggatacaaatcttagatgcaaaatttgtatttcctgtatactaaggactatagtagtttttcgtcactaacttggattctagttctgtgattgttcaaggaaaaggaagtgcctcatatcctaaaaagagggtaatagtagagaagagttgttgtcaagtcaaatagagtatacattctctgccttcagtctggtttgatgatatgtttatgcatgtggacctgtactgtatatgttctattgaacagctgattgatagctgtatacaaggttcattttttcatgaaatcaagattgtggactgccttttttcagccgtagcattacatttgtccgtgaatcgcaagggtttcaaagatcaaattttagctactactactagattccaacagtcatatgatcataagggaaagtaggcaggttcattctggaagacagtgggttttagtttctgtagaatgatgtagtgcaaaccactgctttaaccggcctgtaagagtttaatcccacatgaatgaaaagaaaaatgcgcaaggattgcgtgaattgagcatgttattccctttccttccgatacattactcattcaaaacccttacaattaataggtggcaggcttgtcttgaaatttgaattctgcatcattccagagaaacacatttgaatatttgatgatagccattgtagtaaaactaccacttacatacccataagtcatggaaaattccaagcaagagtcttagctgtgacaatatttatgatttatttccacgacgattcatgtcaaaaacacaccagctaaaatgtgatttaaacaaagttttaggctggtagcctctacaatctgtaaatttagagatccaaaacccctcagaccattcaaataaactgcgtggatatccatctataatgcttctattcaaatagaaattcaccagcttccaccagacaatgttgtaaagtctgacgagttcataaccaggacttttcatcaatttcaaaccccattatgtacaaaaggaaaaaaagacagcacaacttgagaagatctttacaactgatattagcacggtatagtgagtttactcatgtacaggccgtcaccacatcctaaacaggaaggcacacgaccaattctcacttagaaggggggaaaaactcttatcatcagcttacaaacagatcggaatcacaaagcatcacttgctgctttctctacaagtggtcaagtaggatctccaatcatacagcctttgagtatggaaattgtgtcagtgtaagttggtcatgcactttcactgcctttaagaatgttgtacttgcaaagtggacaggttgcatgcatgcgtagccatttggtaatacatgtccaatggaagtgatggttgcaagggagggcagatagctccgctccatcctcatatgatgagaggcagatacagcattcctgacagaacaaagagcgaaagaagctataagcgtagaatgggatatccaactcacaataataggttgtctgcaacctttgcactgacatgttcagattcatttctggattaatgggcaaagcaattcaagcaaccaatgacatctctaaggaacttatctgcgctatggagggccaatgccaagaaatctctgatcatttttatcaatactctaatgaacaatttcatgtggaaacaataaggtccaactgcagaatgttgtaagaaaaagagcaaagttcttacagcatcctcatgaaggagaatacgttcactggttgatgttccgctattattcagaacagggatcataactccctcgtcagttcctttttgtccatcctcactgggatcagaatatctatatctgggaagaaagccaatatccgcatctgatgcaccctcctacatatttcgaagagaacgaagtaagcaatatgtatcaacaatgttggtagtaccaaggtagagaagaagaaaatttctcaaatgcagagttcttcttatttacctggccagccagtgcatatagaattgcaatgacacaaggcaagcagcagcacaatgcgatcccgatgaagcaggccatagcaacgcaaaacacagcgaagaagacatcaaatgctagaaaaacaacacttagcctgcacaaaatattccaaagcaggtaactatgtcaggcataacagacagaatagctctaattaattagtagtggagacatataaatcaatcgcatgcaatattttgatagaaaaattagcagcttcatgtcattacctagacaatacacatcacaattcacaactaatgatttttaaaattgcttatgtaaacaagtgtgacaccttaatcaaataggtgccttagtgcacttgttcaagtagaggcctgtccccaacccccaagaacacaggatttactgtaattcggatgttgcaatttccaatcatggcattattacactgaccatggcaccagtatgaaaatcaatttacatgtgaacatttgattgtacgatcataaagtagtcagtgatgggtacaggtttagggccacaataccaatacagccttggagcatcttgctcgagcacatccccgccagacaccacccagtagaacccaattatccaccacagaaatgacaccatcgtgtttatcgactcacaacgcttcgcaaaactgcatgagtagcccaaatcatcagacgtggttgagttagttggtgagtcaacactcactacacgggcataaattcgtagcacgaaccctaatcccaagttccaccacacggcgaaaccggaattcggggtttcaccctcttgcgttacctgctcctctgctccctaccctcgtcgtcgtcgtcgtcgctgtccgagctgtcggtcccagcgcccgcggcgtcaccgtcggcggactcgacgtcggagctccgagcatgggccgggcggcggcgggagtcggagcagacgaggccgacgtgcacgaggcactggagggcgtacccgacaagccacaggcggagcggcgtgacggggctctcctccgtggaggcgacgagcacggccgcggcggcggcggcgaaggcgacgttccacgcgatgtcgagcgcgacgacggggcgggagtgggcccagtccgcgcgccgcctctccagctgcatcgccgccgtctcccgcaccagcatcgacggcccgcgccgccccgccgcgcgcccgatgagcgccgcgagccggctcggcctcgccgcgggcggcggcggcgacgacgacaggttcccggaccccgacccggcgcgtgcggccgacggccgcagcagcggctgctccggcgacggcgacgaggcggcggccgcctccatctcgggagatgtggggggagcttccgtgcgcgtccttccgttgtcttcgctctgctgctttcccgactccaccacacaggcctctcggactctctctctctctctctctctctctctccgctcccttcattttgggccaggccgttctgattttcaatttgggctgggccgatccaccgtgttgcacgtaaatagcccatgtccgaagttttgtagattaatccacaaatatcataatctttttgccaaacaccacgcaaatttctccatattagtccacatttcatgcagattaatccaaattaagaaataaccttgcttcaagcacacgcctcattcagaaaaaaatgtttatagatcaatatcaagccggcacgacaatattttcacatccatatatatttacatgggtgatgggtcaatggaaaaggatcctaacaaaaaacgcgaaacgaatgtacatgaaattatagattaacggtgccattagcaagtccagtactaaccactcagatttcagaagatttgactgccaaatgagagagagctgtatagacctacatccacgaccaaacctatgcagtaatccacgcttgaacacctcgagactctacaccttctccacctcccggaagcttcctcgccctcgccgcgcgcggccgccgctgaccacggcggcggtgtcgccgcataccgagacggcgtgcctccccaggagctcggtcaggaagccgcccttgtcggtcgccggcctcgtgtatgaaccggccgccgccttcgtcgtcgtccccttccgtcgacggcgcccatcaccacccgctcgtccgccaccgccgccgccgcggcacccactctccctcacgagcagcctctccagttcccgcgtgatccactccacctcgtacacgtccagcagcgtcgtccccttccccggcgaccgcgccggtagtggcggctgcgctcccacggttgcctcctcctcctcctccgccaccaccgccgccttcgccggtggatccatggagatggtagagcctgagtgccggaggcgagagtgtgagatgggaggagagccgaggaggcgagtcaagtactcaaaatcgggtcgaggtgggatatggtgcagaggctgtcagtgtgtgggcggctgggcgcagcaacatttatgccgcgcgagttggtgcacttggtggtatcacgcgtggtcaaccctactattggttcccgcgggtgagccgtgcctatacctggccaaacgggcggcccggcccagcacggcacgggcacgccggcggcacggcccgctagggcacggcccgttaggcacgactcctgtagcgggccgtgccgtgccggcccacgtgcctactccccggcccaagcacggcccgagggaacgtcgtgccgtgccgtgccggcacgggcacgtcaatggcccatgggtcgtggtcggcccgttggcacgatcgactgcaggcaagctggcaaggcgacaacgccgacaaggcgcgcgcgcggatgaaaatttggacgcggcacccgggagcgagcggccggggccgcgggaccggccggccgaagggcgacacgtggcgctggacttgctgaatgctgactcagtgacttgcctctgtccgtgtgtctatcgcatgtcactctgtcagtggaacaattcaaatcaaagagaaaggtccgaaagttaactaagctaagagaaaattaatggatagttggagaaaaatagaaaaataattagacttagaaaaatattagaaaaatatggggaaaaaagagtaatgacctttattaatgtttacatgatacatgctgcctcgttaaaaactttgtcatgtaaaaactcatatttgagaaaaccatgacaaagaaaagaatacagccaacaggtcaatacttaaaaaatataaactagctaccctaattgttcgtcatctaaataaaggttttcgaactgtgcggccaattcttggttgtcagcagtgtattgggcatgttctgcagcaagttcccagtttttgacgcttaatagtatttccacatgatcgctgctcagacttgttctcctatcctcgataattcttccgcatagactgaaggctgattcggaggataccgaagatacgggcaccgtcaacacatcccgtgctagttttgatagcacaggatattacatcttatgatcattccaccacccgagtacgttgaagtctgacgtttcatgcctgatggcatcgctatccaaatagttggacaactcttcggcaggaccatgcgatctagcgtccccacttgctgctgatgaactggtaccaccaccatggctagaagatgaaccgccccaaattctgctccactgtaattttttcttacctactgcagggacaggtgggggtctttgcaagcgatctccctaaaactttaattcatactttcgaaatacctcatagaatttagttttgacatcagcataataggtagaataatcaacattaataatatctccaataagtgaaagaatattgaggaatccctgtaattttcccctaggatcaagaataaatgcaaaagaatacaacatggggatgtctttccaatatttaagatatttttgtttcatattaaagacaacgggcattaaaaggtcatcattttcatactctttcaacaaagtggcaatttcaagaatattatgcaaaattaaattagctgttggataatatacttgagataacagaagagtacagtcatgaaacgtttcaagaaattgattgaacctttcaacaatgtgccaggtatgatcagtcagtattggctggccgtcactgttttttgggccattacgtgtttgaaggaaaacagtaagtaaatccttgtaaggtaatacaacctttaacataaaataagtggcattccaccgatggtctgcatcggttaaaaacttacgtgggggctcacccgatgcacaacaataccttttccactgtgcaatccgtgggtttgaagcagttaaccacgtgattgcttgacgaacagcgtcgatgtgtacattaactctcctaaacccacatttaacaattagattaatgatatggcatgcacaacgctgatgtagaagaaatgattgagcataaatacaaaataatggttgtagaatttccatggccctagaatttgcagatgcattatccattgttacagcaaaaattttatctgcaaggttaaactcatcaataacctctcgaattctctctgctatattttcaccagtatgtgaaacatcaattaaccttaagccaagaactattttttgcatttgccaatcatcatcaatgaaatgtacaactacactaaggtaatcctctttagccctactactccatatgtctaaggtgacactgacagaaaaaggtgcatgtactaaataattccttcagtgattcataacctttgtcatagacatttttcaaatcacgggttgtggtttgtctactaacagcttgaaacctaggattatgagaattttttatgtaattttcaaatgcaggactctcaccaaagttcaagggtaaatcttgtctagcaattaaacgggcaagattttctcgagctaccataggatcatactcccacgtacgtaccgtaccatcacgatttagtagtagttgttgctgtcgtagttggattccttgcttctttgcacaagcctcggcatgccgcttcaaatgtcctgttccaccagatgattttgcagataacttatttttgcatattctacatctcgcgaatgttacctgccttccatcagggcctgtcatggccacctcatcgaaatgttgccaaacaccggaagttcttgatctctttgagccggtgttcgtcgatgcactcccactcatagtgccagatgcttctgaacccgccggtggctccataactggtggtgttggagccgatccggtggcatcatactcaccagttgggaatgacctcgacatgtagttagggtcgaaatcacctaacgtgaacgatggaatgttcgattcgtccattctgaaaatttaaaacaacataaacaaatttcagaatatttattcgcataacataaaataaaataatacataaaactgaatatatgacgtacttctttcttaccacctttgcttggctttacacctcttgtatgcactatttttattcacaaactatttttgattttagacaaaattttgtcaaattttgtctaaatcaaaaaatcgatctatcacacgaaagagcacaacagagcacaaaatgggaggtatggatgattcagaatgctccggtgggtgtcctatttatagaaataaatttcatatttttttcgaatttttttccatttttttgctctccaacggctacttctcaaaaacagcggtcgttggattagctcactagccgttggggacacgtggcactctcgcattcgtcgtttgactagctgttcggccgccgtacggggtctcgctgagtcgcctgtcaccgtctcggctgctcccaacgaggcacggagtgacggaggcagtcagagcgagagcgacccagcctcccagccccagcgacacgtcgcgacgccgcttgccacgtgccacgcgtgaacgcagcgacgcgcgcttcccgccgcttggccccgcggctgccctcggcggctcggccgcttggcgccacgtgcgcggtgtgcctaccctaggccgctcccgtgccgtgccgtgccgtgccagccctctacagtaaacgtgccgtgccgtgctggcccacgggctatggcgtcggcccagacacggcacgggtaaacgggccgtgccggcatggcccacaggccggcgtgctgtgccgggcctgggccttctatagtgcggtcgtggttgggccggcccggcttggcacggcccatttggccaggtatagccgtgccatggcgaggcaacacgttgctacagctgctagtacataatccatccgtctcaatgccataagtcgtttattttcgttctaatcaaacttctttaaatttacataaaaacatgatagcattttgaatataaaacaaatatattatcaaaacatatttaatttagatttaataaaaattatttggtgtcgtagatgttgtttaacttttaaacttaacaaaaattaacttagaaaaaatttaaattgatttatattataaaacaggtggagtagtagtacgaaacagcgacattttctctcggacacttttaccactcgaaaaataggagtaaccaacatacaacacgtcaacacagcatatgctacactcgacgtccgaaagttaagtagcacggctagtgtagctggaagtgaggattaaaaattcccatatggccatatactcatacgagagtcggtcaacgatgaggttatttgctagagtagcgtggcgattggccacgtacggcccacgggaagttggctaaggtggaaacgccgagaggagtacgtgatcaggaagatcaatccgtggaccgttaacagctcttaatttgggttgtttatggccttggaacgtgcagacaggtaatcaccgggaatgtttagtcttaattgctcgcgagctacgtcgatcggttttgctagctgtcggtggtgcttaatttcgtgtttcgctcataattttctcaaggtcacaattcgaaaaggcagtgatgatgagtataatcgatagcaacttgactgaaaaaagaaaccaacaaagtgtcaaagtttatattcgtaccgtgtaacaacagcactgattggtccggacctcgtaccattaccgctccgtccgcacgtacctgcttgtgttcatgatagatagagccatagaggtgtaatacgcgcgcacagctggtcttaatttgccggttaattaattccaagcacacaacgtgcatttgattaatgtatagtgtagtggaggcagaattatggagcctgcggtttacgtacacacagagacgcatcgtcctgtataaatatttcagctctactaaacaccaacaactactaaacactatcattctctccagtctccactctacatttttttttgttttctcgcaaaccctcctaaagtatagcttgccctgtcacgactgggctagaatatcgacatgatatagcgaaggaagcccacgccgtttcttctggagcccaagttcccaacggttgcactgagaccagcccaattaagcatcctcggccataagtttatgcacggagaagtactgcaatttgagccagattgatttagattttttaaaaaaagaaacacggtaaaaaaacaaaatcatataacatgcacacgctcacccctactaacacacgtcgtaaccattgagtactcccgaaaaaatggatcaacatagattttgagattgaacctctcattatcaacaggtatgtcacctaccactgaaaaaataaataacaccgttttgatttagattattgatgtagattatcttttatcaagtccacatatattctattagtaaaaatgataagttttcactactgtctgtcgtagtaaaaaaacacaggaaagcggagaggaaaacctttacaagaagcttggtatcatcgatgcagaattgcagatcatctattttattatagagataagttaagtactgttgaaaataaatttaacaaataatcaaaccatgtcgtctaaataatgcagtaaaaaacttttaaaacattttttcatacatggaactatggaacaaatatccaacaatccgatgaataaactgaaagtaacatgaacttggaattaacaagcactagttcactaccgtgaagattcctagagggagacagaagatggtaaacaaacacaagctatattccatcgtctcaaaaaaaatttaacttctgaagtttaaattatatcccataaaaaaccaaaatttaccattatacttatcatcagcacataaaacgagtaattttattctttcaatatcatttatctatctattatcattactattttttaataataaaagtattttagccattttcactcttcactagttttatcttgggatgctaagaatagaatttttttggggggagggaatgagtaaatcctaggccctgtttggttccatgggctaaacattagcccctaccttttagttttgaattagccctcaatgattcaaaaggtgggctaattttttgctaaagtgaatttagcccccctcaaaatattagcccctccaagaggtgctaatggtgctaattttatgtgggaccatcaaaaagcagctatctctctttctccttctctctcctctctttctactctctctctctccaccttttagctttgaattagcccatggatccaaacatgccaccctagactaatgtttagcctaacaatttatgactaaacattagctcttaaaattagccctgtgctaatcttcctaacaggacctagacgagtcctggaaacatcacataagctaacttgtccaaggacatcgatcgtacaccaacattggtcagattaggccgtcctaaccatcttcaagtgcaagacgacggcccaactcgacaggacaacaactgatccgaaagcaacgcgtcgacggctcgccatatcgatccacatgcccaatcctgatacgatgccactacggtctcacctgcactacaacacctgtgcacctccacacaccgcgcaatcgtgcatgcctccgtctagtcgtgatcggacaaagagagttgacaggaaaaaaaaaaaggcaaaagccagcgagcgcggtgcgacggcgcatgcatgcacccgcgcgcgcggcccgccgcgcgatggcccgcatcgcatatacatcggcggattcgcggctcgccatcccgtcggcaagcttggtgacgacgcctcctccacgcgcacacgcgcgcgatctgcccgatctggtgcgtgggtgtgcacttgcgatggatggcgactttgccttggcttcgccataggctcggccgtttctgttggcattgcctacgatcgagagcggtggcttcaagccacgacgcgcgtacgtcgtgtgcgtatcgatccagccagccttcactacttgcccatgcctttctggtgcctcaccaactcgacacagcctctgacaagtggctatctcgatagccggctcgcactgtgctactgcctactactcctagctcgcataggattcctcggcgacggcggcgtgcggttgcaagcaaagctctcggttcatggcgaacaactccaactgctgcgggttcatggcgaacaactccaactgctgcgggttcatggcgacgtacacctttttctcgatagctcgttcgtgcttggctgtcgctgttgcagtttctgctactccaagaagagagaggcccttgcatcaagcttggaatcctaaaccgggcagcgaagcaagcaacaatcaacaattaagaagtgcatgcacgctggctgttcagaggctgatgagctgggtgcaaagttaaagatttgtcaggtagactgtacatgtggacggttgcaggctcgcagcgtgaaagctcacaggctttgactcttgaccgccgacatttgcattgcagtgggactcacctgcggcgctgacaggcctcgcgtaccaacaaaacttttgtggtgatcttcccggtaaccatgctcagctcagactggtggattatttttcttgctctgttgccttgttggtcgctgtttctgaaagttgtatagaaatctatccatacatctatttttttttactaattcaccgggggagagtttccccacctgaatatattgcatcaaacgaaagtacacagggcaggtttcacccgcacaagcgcaagaatcctagaagatagtagcagaagatacacggggagtacaaagaagataatacaaaagagaggcgaccctccgaaggtaacaattgacgtttatcatatgtaaaagacacctattattcaactgacatggatttctttcacaatgccggttttctttattggcctatttttctattcttttatcataaaaaataagcataactttcgatgtctatatcaaccaaagatacacataactatatttatgaacatcagcatttaagcacgatcatacacccacgaatccgtcacaatatcaaagtcaaaggattctgtcttcgttatagtactcaggcacaaagcacacatcttaggtcgttttgttagtgctgataaaaaaaaacatctatgcttgcaaaaacttaagtatggaacaattatgggtcgtggggcgtgtatatgtttttactgtctattggctgaaatcatgattcgttctcagatgagagtagggaccgggtgcaagcacaagttcacatgatttttagcagctagtggcatgaacaaaagtggggttttctttcctccatccatcatatggaggagttggctggccactagccggtgccttttgatggcgaagtggtcactcctcagtagaaactttctccagctggtcactcctcagtatgcagacaagcaaagcttcagaaaacacttcatgttgcttggtaatgagcttatatgtgacagtaatacaacatgggcatccggcgtcattgtggccttcaaacacaagcatatcatgtgtggtgtctccatcatctgttcttttgtgtaaattatcccctgctttggaccccaagcatccgatttattttattagggggggaattatgtggtttgtgatgtcactaaatcactaatgactggaatgtggtgccatctgtcctcttggctttgacttctccatgtggctaggttgcaccatctcaatgggcccatgcaatctaagcaagcaatatgcaatccaatgcaaagggaaaacatgcttataaatggcaaaaggaaaaaggctgttcaccaactaacttacttcattattccactgattatatataccgtacgtaggagataattgtagtctacggaacaatttattatctgtcaaacactcaaacatacctagtacttcttttctttttttacttatgcgctcagtcgcacctaacaaacaggatcatcagcaacaagcacttccctcaaaaaaaaaaaacagcaacaaacactacactctacactagcatgtaactatccatctttctagcctagcttaaaacaaattattcagaggattattaaaactgattaacaatctacttgtttgcataggtaaaatatatatttttcagaaaaaagtaaactcagtaaatagcttagaacaaatggttcaataacgcagttaaattcttttaataaaatactccatcataatacgataaaataaacaatccatcataaataatatgataaaatagctgaagtggacgtcacctaatatgataacacgtggaccttaaaggatctactgagcactaagcacagcatctcacttgaggagtttagggaccgacctggcaaagctacgagatgattagtcggtactcttcttatgatgtgacgccagcttttaccacctcggatcctctccaatccacagtaccaacccaaccataacactgatcgttacacagggtccactgcatgcattgagcagttagattctgttttttgggaccttgagttgaacgttgtgacttgaagcaacaagaagacttttcttcgtctttagcttagcctgtttatttatgcgtgtcctcgtaatcccgatttggccaaaaaaataaaaggcaaattccttttgtagggattactaaaacttgttaaaacttgtcagtgttagtgccaaacaagtcctgataattgataaagatgcctttatttgtgcccgatcgacaaccaaacctacgtttgagcctctcttgcctaatcttttactgtaataatactatcattacaatcattgacatatgagttacatctttctattatcacacccgttatatctataattgtaatgttattatagtaaaggatgtgaaccctcaaatgtctgtgcgtctatcagtagcatcgacatgcaccggtgcaaactgtggtcctacaccgttaacaaccaccgtgacatcatccgttgacggcagggtctagctaacaattggaggccccgatgcaaaaatgtataatagggccttacaatttgatagccaaatatccaaggtcttttgttactgtgatcgtcacaatatgattcatagaatgatattacatttagttttatgcattagacctgctgtgtctagttcagggtcttagttctaatcttttgaggtttagcatttcagttatatcattattagtgtatacttcagggtcctggacttcacgtcacggttgcgggctgcagcaggtagaagaagcaacgcgccgtggctcgccggctttccttcgttgcagggtaaacaacgcgtcggtcggaggcgaacacgtcgtatatacgcgcacacagtagttacacatggtccggcggagtcggtcttcacgccagcgaagaacagccgtatctcgtcagtggtcagatcgatctaccaatacacgcgaccgatcgaacgaggcgaacgaacaaacaaccgcgcgcgcggatggacgctcgcgctggtggtgcgcgacaggaagtcaagatggcatcacgcgagagccagttcgatacagcgcggctgcgtactgcgttaccgggcacatgcaggaggagggtaaacacgctccaccggcgacgcgggcagaggcagctggctacgggagtacgggctaacccgcacacgggcgaggagaaaaccgccgcgccgtgacatatgagaccacgtacgtacgtgcgtgcgcgcggtcacgggtgccggcctgccgggtgcgtgctcgtcgtggcgtcggtttttctcacagcccgtccggtaggatacgcgctacgctaccaaccgtgtcgtcgtatcgcggtctaccgcgaataggaaagacgcgtggtacagtgccaaactgccaacgtctggatgactggatcgccttggcatcacgtacaggtcgtaggacgcaatactggtggttttattaccaggaagagctagacagattaaccaacacacccggaaaagataatccgtgtctgtttgtcgcaacatggttttgctggacaaacgcagccttcttttttttttaaccggccatcgaccgactcaccgcggatggatccggccgaggcgccgctttttctcccacgtggcctgggccttttttctcgtctcgggcagtgcagaattgctgggggtttgttcaggatcgtcagttcgtcatgagattttcgtacccatgcgtgccaatgtgctgtgtactttgaagcatggagtgtggaccaaagttgagcatcctatgagcaagtttagagggttgttgacagaaaacacgaggcttgggagatctgcttaactccagtgcaggttcaaagctcgccttcgggtgtgttagcgtgccagttgatttaatcctgtaatcaacaagaaatagaagcaaagaaactgcggttaaatttataaatgatagccgatcggctaggtgccgatgacatatcatttatctttgagccgatgtcatatgtgaatcgatcggcagtcatgaataagtaagaaggaactaaatctactcgatcgactgtagatagtaacaatatatactccttatatcgatatatacttaaatcaagtgattgggatagattgatcatcatgccgagacagtataaatcacttagatcgaaatatatattaataacaggactatatatgtttatagcatagccgatcagattgatctagcatgtatcggctaatactccgatactactatatatcaggatatttaaaataggtataaagtatcaaacaaaggcctaatacgcttgaatacagcaatatcttaacataaatggcagatttaacatgtcaacgaagcatatagaacaaatgtggttcaatcagataagatcggctgaaactctgatgttactctaatcggcaaccagaaggcaggctagaggttgatattctaagcatgacttgatagatcaaactcaactaatgcaacattaagtatgaaaaaaagaacaatatctagacaatcaagccgttggaagtttcataaagtggtagatatcttatataatctgagtcaacgttagaatctaacctaatcggctgccttcttcaatagatgttagctgattgtaggttagatagcggtattgccagggattatgtaagatatatgataactcgacgaatcacataaacaagattagagtatcataaagatggaaacactaatcttaagaacgcaagccgtcataacaagttttacatcttgttgaagatcgaaaccgatgcagctcaacccgaaagcaagaactcatcgaaacaaaactaaagtaaaagggtggcgatgcgccaaaattgtattgaacgtgtgtgttaaaagttacatagggctcgggtctatttatacccgagaattacaagatatgtccataacagacacgactattatctctaacaaactctaaaatattataagtctttgcggcagacttttgcccaaacatatctttaaggaaattacataaaacatcctaattaataaatacaattgcctcctcaggactttatccatgtgcggcaatcaccttgaagcacctcaatccaacccgacatcacacatcaagttgtattgccgggatcggctacatcggtttacctagtccgactcagactcagccgatcttatcgtagccgatctggactccagccgattcctgctctgttttcaaactcgatctccgcctccgacttcacttcgatctaatcttcttttccgatgccgatattaccaaatttggttgttaacaggggtgtttgggagagaggggctaaactttagccagtttagcccctctctcccaaacacccctttaacagtatagctcactactagctctaattcatctatagccaatctaatagtcaattcatacaatagttgattactatactctctctctctatatatatatatggtcctacctgtcatacacatactacggacttgtttggtttccagggacttattccaagtccctgtcacatcggatgtttggacattaatttggagtattaaagatacactaagggggtgtttgggaaggagggacttcacaaaaattttagtctctctcatagggacttatgcttttgtgagagcgactaaattttagttcctccttccaaaacaccacctaattacaaaacccattccataaccttggactaattcgcgagacgaatcttttgagtctaattacgccatgattttgacaatgtgatgctacagtaaacttttgataattatggattaattaggcttaaaaatttcatctcgcggattagctctcatttatgaaattagtttttttattagtctatgtttaatattctaaattagcgtccaaacatccgatgtgacatgggctaaaaagttttagccccatctaaacaccccctacgtcttggagtccgtgctgcaactggctacagatctctgtagcccgctgctcttctctcttatctttaccgtgtctcaataaaatatgtttgtagctggttaatagtttgctattgtacgtgctctacgatgatcgatcaacaatggccgtcaaacgtttttgcagcttgtgaacttcatactgtcaaactggagttatttttttcccctccactctgtcaagctaatacaaggtgtccctgtcactgaaaaaaagggataaaaaaattactatactgtaccatccgcttttttttcctcctacactatgcatgtgttttggttcagtttatgcttatgttttccagtcttttgtaatatggttttggtattcgtattttgtccgactgttagcaccatggagacggaggtagtacagttacacaaaaatattccggccccctttagaatacaaaaatattacaaggttttctatgtatgtaaaaaacagttcattttctttaatactcccgcaaaattcctccgtttcaaataaggcctcaaggagagccttactgcttaactattgcttgaagtactgttgttcttgccaccccaatatgtggtccaatagggtaccaattcattagtagatttgcagtgcatatccattagctcatccacttaaaaaaaagtttcattgtagccatgatggttttattattggggacggcaaagcttcctccgacggggagcaaaattaaagtttcatgagatgactgtaatgaagtggacaaatcattaacgcagcaccactgagtttgacctaataattctactctcatcacgcagcacatgacatgcagacgtgccttgtggagaagacaacctccacatatgttacgtggctaaactgacagcagcatgcatagagaaaaggcagaaagcgtacaatacagtgcacttgaagatcttgcttccgttgcacactaatcttacaccgttcaaagcttaatttatactgtatatcatcaacagtacccgtgatggtaacacttgcgttttgtctgcatgcataggcaaatctacgcttgaaagggagtctacatagtagtactagaaacaaactcgcatgttccctaccggcaaagcatgtaattaaatctctaaagaagttgtgttgcggaaaccttatctcaatatatgaaaaagggtgttttaaaaaacagtttgaaaatttgacactttttctttttttggtgaatgcaatttaaaccaaaccaatgactaacagtggcgccttttatgcttgctgctttcagcgtaaacgttcatatcaacgaccgtcatcaattgatgatctgactgtctgagacgaccatgaaatagtaaccgtatatgcgctagctagtaataacactgacatcaattagcaatttagcatccgtgaaaaagaaatatcatgaagagatgtcatttcttccaaaacgagagcgatatcgtagcaacccaatacccccaaaagaatatttcaaaacgtgccaaaattaatactcaccacaaatgacacaaaatacgagttttcggtgaatacaagttgaaccgacaaatcaacgagtccatgacgaccgaacagccaccgtcaaattccagaataattagctttgagcctgaaaggaactaaacagcgtctaatcaccacgattaagctcgtcgtaattaccatctcagctaatcacccccgaaacccgacgctttaaatattcgcgaagcgtcccccccttccccatctctctctctcctccggtttttaaacccactgttccgagcaagacaacagcagcagctgctcgcggcggcgaagcgagacgaggcgaggcgaggcgaggcgaggcgccccaccatcgtgaggaggggggagccatcaactcgagctcgacgcgccggcggccggggtgcgaggctagggttagggttcccctcgatccggcattgcggaggccccccactcggcgcggcgggcgcggcgggggctcgagagagcgagagggagagacgcgcgtgatttggatggtggattgcggcgccggggctcagatctgagatggcggacggcggcggcggggaggaggggagcgcgtcggcgctcaggggctccgcgcgacggcgcggggcggtgcagccggcggggctggacgccgacgagctcctcacgctgatgcacgggtcggatcccgtcaaggtcgagctcaaccgcctggagaacgaagtgaggggtgagttgatgattcctggatgattccttcaattccttctggggatcttacgggctaatgcttatgtatttttctcgtttggttttagataaggatagggagctcggagatgcgcatgcggagattaaggcgctaaggctgtcagaaagagcgcgggagaaggccgtcgaggaggtaaacggcctaaccgtgcttcggatttgcatacaagttttgttgttgtcgcttttgttttatttcatcagtaaattcgttctggagtctggagtagtgtcggtgtacgagaagttcaggagacttcagcgacaaatttgatgtgtttggggggaagaaaacactgacaggtttagataccaggtggttatggcgggaatgttaggaacgagatctgatatcttgtgtattctgctgtagtcctgtagataatgtttgattaggtttaatgggactcaagagtctcagatagttttatagctcactccaagtgatgtatcattgtggttttgatttgtttactgtaagtttgccttttgcttcaagtatgttaggtttagaaaggctgctatatttttctcacatagtttaagttttttttcctctggggaactccttattcttttgggcctagatatcaatgtgcacctctacactagtatattacttattattttgttattttgtttcatgtttttctataccatacttcggttatttgttcaggtgcccacagtagtttttccagacatgttggatacaattagcttgagcggaatgattcaccttccttgattttgtctttccttttctcatttttacaagagagatattcatttccaaccttctggatcgatgctcacaagcgttgatttcaatgtttcttggagcacttctggactaggatggatatcttattttgtttttcatgtaactttggtttgcaagcaactaaacaagtaaataaacttagttcaattaagaacaatatgcacaagcactgttgcccacatttgctcttgatctgagggtgtgtaatctccattttatttagagcaaggtaaatcttttttttttcatttttttatgtgcttctgtagtataaattatcttgcctgatactctgatggcattcatcttgatcttattattgctatagttttctttagtttcctcatgtccttttgtggctcacatttcatgtcttctgacagttgaatatatcctgtcccagtggtggatctagaaaaaagtttgagcctgagcaaacttaactatagctagaatttactcgaaaattcatatttcggctttactagatacatagaattttaatggattgcccatcgatgagcccaggcggcctcttgggatcgctgggcggtggatccgccagtgtcctggtcttaaatcatgtttgataatgggcaaaccaaacaagtcactccttaaaagtaaaaaaaggagggttgtccaagtttttattttttgttctgttgggaacttggcactaactttgctgtgtccaaaggtttttctggattttcttgtaactcttttcaggctagtgctctttgttgtgttattcctgcatttggtcaattagtagactttgtttcttcagagttttcattattgggtatactaggcatatggggtatctgcatgatatattgtgcattcatgcttgtttcttcacagctattgatattattgctattttttttaatctcgtgtcaacagctcacagcggaatatgagaagctggatgagaaactcaagctaacagagtctctccttgaaagcaaagtatctatctttatactttttaaagttgtttctgcccccctctttttgattgctccctgatggagaacattttgcagaatctagaactcaagaaaacaaatgatgagaaaaaggcggctatggctgctcagtttgcagcagaagcaactctgcgaagagtgcatgcagcccaaaaagatgatgatatgccacctattgaagctattcttgctccacttgaagctgaactaaagcttgctcgtcaagaggtaatactgtgttactcaaatggccaggcatggccatattttattgttcattttgtttggtgttgatattacaatattttctcacacttatttagattttgcctcttgcttccatagtcctaattcaacttctccattccaccacatgcatgttcactataattgtctaaagaataagatttgctttttttcttcagattgcaaaactccaggatgacaacagagctttagatcgtctaacaaaacaaaaggaggcagcgctgctggaagcagaaaggactgtagaaattgcattagcaaaagcggccatggttgatgacatgcaaaacaagaaccaagagttaatgaaacaaattgagatctgccaggtacatgtctagtatttcacagtgttgtaagaaataaccgttagatcactctgataaaactgaatggggccaatttgcttggtaccatctcaaaaatctcggagttggagaataccatcgtatgtgtcattgacatgtgggtctaggcacctcatgtcattctcccgtacgtctgtattttgtaactcctgtatctccttgatggcatttttcaatttttctcaaactgaattgattatctttctggattaaaggaagaaaataagatcttggacaggctgcaccgccaaaaagttgctgaagtagaaaagcttagtcaaactgtaagagagctggaagaggctgttcttgctggtggtgcagctgctaatgctgtcagagattaccagcggaaagttcaagaaatgaatgtaacatcctttactgttgctttcggataatcttcactgttctgtacgcaaaaaagttgacccatgctaatctctaaccatggcacacttaggaggaaagaaaaattcttgaccgtgagcttgcgcgggcaaaagttacagcaaacagagttgctgttgtagttgcaaatgagtggaaagatgctaatgacaaagtaatgcctgtcaaacagtggcttgaagagcgcaggtttctgcaggtaaagatgatatacttctgtttgttttttgaagctcatctacggttgtccatgcaaagtcacacttcacatcatatattcaatttttatggcatgacaaatgtttcttcagggtgagatgcagcaacttcgtgataaacttgctattgcagaacgaacagctcgatctgaagctcaactaaaggtgagaaagctggcattcatcttaagctaaacttttatggaagcaagttacttaattgtgcactgtttcaaaatccttctactcaggaaaagtaccagctgcgcctaaaagttctagaagatggattgagggggccacctagtggttctagtcgtcctacagaaggaaagagtatcggtaatggaccatcccgtcggttgtctctaggtggagcagataatatgtcaaaaatctccccgaatggcatgttggcaaggagatctccatcatttaattcaagatcctctctttctactagcagcagcttggtcatcaagcatgcaaagggaacttcaaggtcatttgatggtggtaccaggtcattagaccgtggaaaagtccttgggaatggacctcatttgctcaatagatctacggatgctgttagagattgtgagacaactgatgattggaaggcggctaacacagaagaaaaaggtagcgaggccacaaatagtagttcaactgacacagtatctggtgtactctatgacatgctgcaaaaggaggtcatttcattgagaaaggcatgccatgagaaagatcaaagtctaaaagacaaggatgatgcaattgaggtatggcactagaattcctgtttattatggatttaatgggaccaatgctgtgggtcatgcctttgctaactgcctcttgtttacagatgttggcaaaaaaggtagatacattaaccaaggctatggaagtggaggctaaaaagatgaggcgagaggtagctgctatggagaaggaagttgctgctatgcgtcttgacaaggatcaagaaaacaaggctaagcggcctggaaatttcaaaggacctggaaccacttctcaggcgcctcatggaaggtatatctatgaatgccttctatattttgagaagctgatatttcagctatagggatattcaaatgcatatacctctgataccggaaagttttgtaaacttaaatatgccatgttgtcatccatttcaattctcgagattcatacttcatttgcccttgagatattttatcacagttgtgcttaactacttataagactgctgactttccctacttcatttccctctgcctgatctcattagattggctgcgagttgcttttcttagacacagcattacagcaaccttttgacttttcccttggattgagtttacagattcctgagtagcaatagtagttactttaggcgttagatgatacatgacacatccatataattaagattttattctctttttggcatcagtagttcttgaatttgtactatctgtttgatattgagcctctatttattaattaatgcctggctaaatcatcttgaactgtcttcttttgcagcagaaatgcaccacggggtgggttgactcggaaccttcaataacatacctctaacaccagtcagcatgaatttcttcgatagtttcggatttccctttgtatttgttcctctgttcgtattaattttgtgattgagatagcacagatgaccctgcgacacctagattggggaaagagtaggcttgcatctgacatcggctttgctgtaatgtagtgaaggtaatccttcggtaaggtttaaccttgcggcacgctcccattttgtcaaggcagtgcacgttgtggttgtataggctggaggaccttgtcttcttcccttctgtaatttagatagtgtgtttgcttttgcttgtcagggttgtgaatatattattatcgcaatatattagggtcaccctctcccgctctatttgagcttggttgggctgtaattgatttctcgtgtttaactgatgtagcacaattaactcttgatattttgtttcaacctcgagctgaatcagaatggtggtttcttgcttgcaatgaactaactagtactaggctactagccacttgccaacgagcaaggtagtatggttgtctgggccgacggtccatgttttggatcttgtttggaatgggctgtatgatatgccacggaactgcaagtctggaactactacttccccattcggtttcacttccctccgggtgaatgtgttgtgctgttgtgttctttacgtcttggaaaatgtctatgcttttctttttggcctcactggtaccttttgctactttgcaaactgcaatatgacgctactcgtttatgtaaaattcgtaaacatgcagcattcgtggtagtgtatatatttttatcctgcgtgggactgaggcaggggagcaggaagcatctttctgcgttgcatttctctgtctcgccggccaactttcacatccttttctcccgacaactttctctcgcaggatccgctttccacgacggtttcacatccttttctcccgatggagttgtggacgtactacttcgcaacagtatacgaagccaataggccgcggttgcttcgccgtgaggctgtggccctgtgactctgtgagtgtgagtcaagtcaatgacccagccagtgagactttcctttcctctctccgtggccgcgagtggaggaaggaatctgcaaagcgatgctatggccatggggctatgtactcggttgcgtcactttgcttacatgggcctagggtgttatctatatggtctatagttctcatttagttttcctctaaaaatatatattctcttttgcctttatccacttccttttttcgctgtcgatcttctattcgctgaatgtactgagtaaacatgggcaacgactgttcattcggttcttgggctgatcatcaactgattatttgggggaaaaaactagaaaaggaggttcagtaaccgtagaactggggccgcaagaaaaaaaaaggagatgcaaaagatggtgcggtttcttcccagcctgtggtatcttgctacttcctccgttccaaaatgaagccatttctgaggttggcatgggtattaagaaagtaggtgagaatgattggaggaagtgtgtgattggttgaaaagagaaagtaggtgaagaagaatggttgtgattggttgagaggaggaggtaggtgaagaaataactttattttgggacaagacactgtgctagaaatagctatattttgggacggagggagtactagtatggggcattgccattgcctattgcatcattatatttacagaccagactactccctccgtcccaaaaaaggcaaaccatgaatttccgtgtccaattttaactgttcgtcttttatgaattttttttataattcatatttttattgttattagatgataaaacatgattaatattttatgcgtgacttgtctttttaatttttttcataattttttcaaataagacggacggtcaaacgttaggcacggaaatcaatgtttgtcttttttttttttttgacggagggagtatgcatcttcagagtcgtacacgatttagcttcatcggtaaggctccattctaactgtagctttttttttataaaaaataatgggatcaaattgcattgattcagctttgcaagaaagccaagagcaaagaatggccgatgtgccctaattaaccaaagctaaaatttgattttttaaatttaattttaaagttcgttttaaaatattttcaacgtagtttcttttttatattggtttttaagtcgttaaggataaatatataaaagttttacctacaaattaaattttattttctaataaactgttttggtttactaagaaatatgggtaaccgatgatgctagaagtctttctatattatgaaacataagttcaaaccatgtgcatttcctatattcgagttgaaccggtacagttcacgttgtttttgtttttgccattttcaaatgagaccaatgtgactatgtgaggctccgttggaaattatgtgacaatatttccttctaactatagttaaagtatcttcattctcggatgagcatataatcgagcacgcacacccttacatgctatactcacaatattgggacaacttatatacgcacacatgtacacttgaaatttaaaatgatttctttcaaaaggaattttgaaaatgatcagaatgacaaaacaaccccttctaaaattggtcaacacaatatcaattctaccgtatcatcatgtgtactagtagtaatgtgttgggcttgttttgggataaacatttaccaagaggggcatttcattttttttttggcaaccggatcctagtaaaagccacttatatagtagtatatcttttaaagaagaaataaaaatgtaaccttatccgtggcaatagatcttgtgcaatactgctgctatgataataaaagccacacatatatataggccttcacgttccattcttttccatgctttgcacgaatctcgaagcaacatcaacggtacgtgacacctccggccctggcctcctgcgccccttcatttatccgtcttcgctttaattcctttaaatgctacgtgcacattgaccgggcgactcctcgtcctcgaatccctctgctcactaccgtcgcgctcgcttatattgcgggagtcggcgacgaaaaccaccgagcacccgtcggcgcagcagcggcggagcgaagggaagggaagggaagccgcgatccagccgccgtcgactcgccgcccacgcagtcgccgccgagccccatctccgccactgctcggtgcgtgcgatcgttcgctttactagctgtactagcgctctagagtgctgtgctttccccagtttggcgtcggtgctcggcgaacctgtgtgttcgatcggatgcgtattatgtgcgggcgatttagtgttgatgtgtcgggtttttttttatactcttgggtttttcggtggtgttcgttggtggggggaatatgaagggttttgagggaggttttagtggaggatgtgaatttgagatcgattcggttgttgtcatgctcttttacactttttggtggttggggggtggaattggcaagcgtggagaagggcaggtggtggagaagatgaggaagtctggtaatgtacgttcatgatgtgtttttgtggaaattgtgctcgtctaatttgatcgatccttttagtttttttctccatgcttctgtcactgcattgcatgataatttggcttttgaaaggggggaaaaaggaatgctctaattttggggaatcaagaacatgtggtaaatatgtatagtccagagtatagaaatggatagatgatagggatacccagggcggagccaggattttgagccactgggtcatggcttttacttgtactaatgtcgtgtttaaaactctaattgttctcgaagctagatatctttagatcaaaattattttggagctagagcaatgaggaagttgggatcgtttcattttgttaaaaataaatgtttaaactctatattttataattattttataagaatgcaggaggttttttaaggtccaaaaatttaaaagttaagactataaaaccaggcataacaaccatgcgttttttcagacataaaagtttgttctgaaagttgtttattacttcctctatctcaaaatacaactacctactctcttttttaaaagattaatgttagggtgtgaaatagttatgattggttgaaaaaagaaagtaggtgaaaaaattgaattgggaaaattgtgattggttgagatggaacggtacatagaaaattagttgtattttaagataattttgaacattaaatgtaacatattttgagacggagttagtagcttaaaaaacacagctaacatctagtagttgattagcaaaactacaggcctaatgcattgatatacacaacacatagctaaaacaaagagttggttaatggatgaaataggtctaattgccgcattagtagtgggttgacagtagcataacctagctaacaaattgtgcttccaaagaagaagctgtactatttcagctttcatgagctccagtagtttagcgacctgatcggggtcatgaagcttttgctgctggggtcattagctgcaaaatcctgcacgattcacttgatcgattgaataccatcggggtcacctgaccctgacgatattactgcagctccgcccttggggatacctgatttacaaaaaggaatctggcatgtgcaatagttagtatcagggaatagtttacaaaggaagcatggagatggttcgcatgatcattgttttgcttgtattctttgatacattacagtaccttgtttacttcactactttaagattatgatagaaacaggataaaatttagcttttaagttctttctgtagacgatacttaccattctgccgtaaatctaaagagctgtgcgtaattcttaacaataattgtttatattgatgagttcctgcagttgtgatatgcgccatgggtgtcaagactttacaggtatcagggtttgctctagatgacagtgctgattacgtcaaggatttgttggagcgaattgttggctgtgggaatgtgtatgcagtaaagctcaggcatccaaagaacgtcactgctacctcaagagcatatgctatagttcagtttcagaccgaggaacatgcttcacttgtaaaaaatgcggctcaaagaaagatactccgccgtgggcattattatctgaaagtccatccttcagatcgtgacattgttccaagaccaagagtttcaatgttcaagctagaggatgtaacactgcattttggttgcctgcttaaggaaacaattttatctgctctgtggagtcgaaaaggagtttctgttgagtttggtttcaatctgaaaaagatttacttttacctgcagctacccaacagctcaatcgaatataaacttgaactttcccatgagagcatatgggagatccagcttcaacgcccacccaagtcacaaacgaagtttcttttgatccaggtatcttgagctctacagcacttgctgatttcttttcagtaaattgtacaattattgtatgaccacatgttcacattgactaatcttgctgttgagatagtttctttagtaaatattaaagtggttcgcctgtactgtgttttgttctgctattaaggcttgacgaagaacggtttagtcacaacagttcatggtgatgacttttggaattttggtcaatggtgattttgctgttttcggaaggtgaaagttacatgggagttctgttagaatgtatgtatcatatggtccttatttgatatacaaatggacaatgttaatgtgtttaggagcttactgtgatggtttaaaagaatcatttgaatttcttctgttagtattcttgttcccctacctgctttgctgtggctcacaacctgcactttagcatggttgaacgacattatactgttcaatcataaattactggataatgaaattgcatttctaatctttgtgtttctttaattcttcatgctaatgaatttatgagtgctctctaactcgcctgtccctttcatttcaaaatatgcggcaatgaagttgtataaagatatgctacttgagtattacttatctggagtgaaaatatgatcgtgttcttatgtaaaaaaaaatatgatcatgctgaagcactgaattcttttatccagtattttcctttatatttccacttcaaaatgttgatccaccccagtcaccaattctagttgttatctcttgatttaaagtttagataaccttaaatttataaatcgtttcatgtttcaggttcaagctgcacctaagatttatgaacagacaccacgccgttctggtgttatgtacgaagatccattattcaactattttagggatcatacagatgatcaatggaccaggacaacggattttacttcatcttctagcattgggcaatcatatattttatgtcttgaggtaccacgtcgatgtgatctcccaaacattcgtgactacttcttttactatcatgagtacaatcatgacttcgagtgccggagtggggggtatccatattcaagtgatactcgctttgttccgattgtgaaatctcgtggttatgtcccctatgagatactcttcaagatcaaccatttggttcagaatgggacacttagcggaccgacagttgatgacagcttctttcgtctggtcagcccagcttttgtacctattgaccatataaagcgtgcacttgaaatgatgtcatatttgaaaaagacctgcttgaatccaacaagttggctatctgaacaatactcaaaattccggagatcacgctacgtccaaccatcacctaacatatctctggatgatggattggtttatgtctacagtgtatttttatggacctgagattaatgtctccaatcgtgtggtgcggaatttttcttctgacatagagaatttccttcgcatttcatttgttgacgaggactgcgagaagctccgtgcaactgatttatccccccgttctgcttcaggacatgatgcaaacagaactgctctgtataagagagttctgtcagtcctttcagatggcatcactattggtggcaagaactttgagtttcttgctttttcttcaagccagctccgagataactctgcatggatgtttgcttctcgccagggattagctgctagcgacattaggacatggatgggggatttccgtaacatcagaaatgtagcaaaatatgctgcaagacttggtcagtcttttagttcctcaaccgaaacattaaaggttcagaagtatgaggtggaagaaatctcagatataaaaaatggtacacagcatgtgttctctgatgggattggaaagatatcatctgcttttgctaatgaagtggccatgaagtgcaacctgaaacgctttgctccttctgcttttcaaataaggtatggtggttataaaggtgttgttgctgttgaccctacatcacgctggaagctttccttaagaaaaagcatgctaaagtttcagtcagacaatatcacagtagatgtccttgcatacagcaagtaccagccaggcttccttaatcggcagctaattactcttctttcgacacttggagttagagatagtgtctttgaacagaagcaagaagaagcagtgaatcagttgaacaaaatggttactgatcctcaagctgctatcgaagcaattgaacttatgcccatgggagaaataacaaatgcagttaaagagctgttgttgtgtggctaccagcctgatgatgaaccatatctttctatgctgctacaaacttttagggcatccaaattactagagctgaaaaccaagtcaaggatattaatcccaaaaggacgagcaatgatgggatgcttggatgaaacacgtacgctgaagtatgggcaagtgttcattcgagctacttcgggtgtaaatgacaatgacaggttcaccgtgacaggaaaagttgtgattgccaaaaacccttgcctccacccaggtgatatacggattctccatgctgttgatgttcctgttttgcaccacatgtttaactgtgtcgtctttccacagcaaggaccaaggcaagtattacatactcctatgttttctagtagtatgcttttttctgcaaaaccccacttttctggaaacaaattctgtctgggtttcacattttaatgaaaccacatattcattggagaaaagcttattctccaatttcatatattttaggttgaagaacttcgttgtttgtgaagcttagccacctgcgatttcatggatatgcgatatttgatcctttttttttcttgttaaattcccatgcatgcatgttcttgtctgttcgattttgttatctacatttggttttaaatatatgccaccattgactttgttaagtaaagtgcaaagagtaccactagatttgtcatatttgtctgttgtacaaatatttatagagaagacaaatagtcaaatgaaataaaaagtcaatggtgccatatttaaaacatgaggcagtaattattttgaacatgattgtttgtgcaggccgcatcctaatgagtgttcagggagtgatcttgacggggacatatattttgtttcttgggacccatctctcattccgcctcgtatggtgacacctatggactatactccagcaccaacagaaacattagaccatgatgttacaattgaggtaagctcagttttcaaccagaattgtccactctttcttgccactcatgctagcaattttattcaattgttggctggctagtgttatgctgttctttggactcacgagtccagctcttgtattttttaagattatcatttactcctattttctggcactgcaagatttgggtatatttatttgcaggaggaaacaaactaatcctagtgcacagcatatatggtttttattcaaaatccttcatttaataatattacacatctatttccctattttctgtaataaatcttgaatattagaaggaagatatgctgcctctttcttgttagaatatttaacttctagagatacgtttgtaattggtgcctcataatgaggatactactgtcaactgagagaatttgtcttaagctagttgttttttttgtttccctggttatcttgtgtaaacacgtactgtgctcacttataagagtagcaaattctgtgttctttttttttttgaaaaaaaaatgtatttggaaaccatgcagtctgattcaagtctaggggtagtctgcatttggttggacagttgctgttcaaattgataatactattatgttgcctgttggaataaaattattaccagcttcatgtttctgaatttgtctacatagcagtcacttgtttttcttgcaataaaacagcacggaaatcacataattaagaaaataaatgtcataaatttatctttgttagaactgagttttagcaaatcttatacactgccctgtaacttcattattgcaccatgcaggaagtagaagagtacttcacaaattacatagtcaatgagagtttaggaatgattgccaatgcacatgtagtatttgcggataaggaagacctcaaggcagagagttcaccatgcattgagctggccaagctcttctccattgctgttgactttcccaaaactggagtgccagccctgattcctcctgaactacatgtgaaggagtatcctgatttcatggagaagcttgacaaagtcacctatgaatcaaaaggagtaatcgggaagctctacagggaaataaagaagcacacccctcacataaagcacttcacaagggaggtggcaaggcggtcttatgacaccgatatgattgttgatggctatgaagattacatcactgaagctatggcattgaaggacgagtacgacttcaaattgggtaatcttatggatcactatggaataaaaagtgaggccgagataataagtggatgcattcttaagatggcaaagaatttcacaaagaaaagcgatgctgatgctatcagattggcggtgagatctttgcgtaaggaagcaaggtcaaggttcagtgagatgagcttagatgataatgggcatggccatgatgcctccgaagccaaggcatccgcctggtaccatgtcacttaccaccctgaattctggggttgctacaatgaaggatatgagcgaccacactttatcagctttccatggtgtatctatgagaagcttttgcgcattaagcaaaggaggaagttcgtcaggaagatgcagcccgagttgttctctctccacaacttgagaatttgagtgtggccagcatgtttgctcttatacatatatctgaacttttgcattgaacatgtctattctggtgcttgaatgcttactgaatgcgggcgaactgctatctagcttgtgatgtatatatgtgtttccacaaacctttggattcagtcgttcacttggtgccttcggtttattgtaatgaaatttggtattgttcccgccttttgcgtaagacgaactgcagtagtagtaatgtaagacaagttgctgtgaatcgtatgcgagtcccatatatgaatgtgtgatctgagatcaacgaatcctttttttcttgcagtgttagaatgatacctctggttcctactatcttttttcatttacagatcgttgcaacatcttcagggtccaaaccaaaaaaaaaaaatcaaaaatcaaatttttttggaatattctgttttttcagttgttagcatatctgcatttggcagctgaaaactgtacaaactctggatcacgggatggtcatgaacatcttgacaccctcgtcgactcgtcgtcaagaaacttgggctagcagtgagaacttgacatgcagcatgatcttccccttgtcgacgtccagccttgcgccggtgacgagccagtaaccggggctatcctgcggtcccatggtcacctgcgacgtgtccacgaacttgagcagcttctgcgcgccgacgggcaccggcggcccgccggcgaacacgccggagttgacgttggcgacgcccaccggcgaggcgccctgctccggccggcctcccttctcggcggcgccactggatgtcgacggcgaccccgagaagggtatggacaggaaactcgacgacctccccgacggcggccgcgccgcgccgcgcgcccacttggactgcacgacggcgtagccggggagctgggagtagagcagcctgaggtggagcacgttgttggcggcgtcgtgcgccacgacgtggagctgcgcgccggcgacgacgcaggcggcggggcggcggcggcggtcgccggcgcaccaccgcgggtcgtacttcaccggcgcggtgcagacgcgcgccagcatccgccactgcaccggctcgtagtaccggtcgtcggtgaccgcctccgtgccacgccacaccggcggcttgtcggccctggcggcggcgacgaacgtcggcgtcgtcgacaggtgctgcaggtggatgcccagcctgacgcacgacacaatgaaatccactttagtcacacaccatccgacgcaaaacatatgtactgtgcatacctaaacttgttaacatgcaatttcattctatgctctttctgatcggccccaatcaaagtttaaaacttacttaaaagttagttttaaggttttctttttcatcgtagtctttgtttttttttagaaatttaactattcgccactattaaatgtggcaattaaccatttattagtgggcccaaatgttatgacacatatggacccacgtgtcattgagataagggtgacaaataataaaatgttttttcctggaagatgtttgatgccttggacaataataaaatgtttgtagataatgcagaggtgcctatgtcatgatggactgataactgagttgtcgctggttttatgttctattttggaaacttaaaattctgagaagcagctggtgaaaagttagctagtgagaatctaaagaatctgggaaatctagcttctagcttttagtttattttctggattctacaactaaaacttcttggtatctgaatgaagatcatctagtttgtttcgaggagtttcttgcagctgcagagctgacataagctcccccaaactaatttcattgagcgcgtggggagccacattttgtgaggtgtgcatgtgtagtagtatgtgtgtctcagtgcgtgggtgtgcatctataaaaaagaaaaacctattttcaagttttcatgtgtatttaattatatttaaataaacctgtgaaatcttaccggttgtttttcttgccctctagatgcagcctcatgccagtaaccggcagcttcggaacaaccacctgcaatttttttattttgaaggatcacacacgccatggaaagtgaaccacagaatggaatttatctggttcagtgacagagtgagaggctgtttcagagtctgacctcagttgagctgacatagagcttggagcccagcaggctgaaatgcagcgccgggctggagccttgccggtgtgagcaagggcccagaggcagctcgccgagcaccggggcccacacgcagtgatgctggaaatccaggaagtacctcaggtcagcgacaggaggcttatctgtaacaatccaatcacatgcttaatttgttattttaaactaatcaacagtaaataaactcgtctaaaaaagaaaaatcattaagctctgttctgttgttacatctgaggtagaggttgatggcgtgagagaggaagccagtgccaggcacgcccctgatgagggaggtgatggggacgagcttgacgttgatcacgtcgggcatcgccggcacggtcaggagccactccgagtggctgctcaccgtcgtgttccctcccctcttggagtatatcaccgtcacaccctgcacacgatgagcaaactcatataattagctagtcctccctctattccataatataagatatggtcaaacctccgttatcaaaaagaaaatattatcctcaaatacacgcagtcaagtcgtgacatcttcgatcattaaaaataaaaaagtattattcccgttgggttttaataaataacgatactgacttttgaatatatatttaatcatttgtcttgaaaatattgtacaaatatgccaaaatgaaagtcatacttagagtaactttaataatagatttaagtcacagtaaaataaatataattacttatttttcaataagactattggtcaaacgtatgtttaaaagtcaacggtattatcggtaaaaaaactagagggagtaggatttaatatgtgaaaattgatattaaaagatattttcatgaaaaacatttcatatggtcaatttttttataagtttcataaatacaggccgtgtttagttccctgtccaattttttttaaagtatacggacacacatttgaagtattaaacgtagactaataccaaaataaattacagattcgcatgtaaactgcaaaacaaatttattaagcctaattaattcttcattagcaaatgtttactgtagcaccacattatcaaatcatggcgtaattaggcttaaaagattcgtctcgtaatttacatgcaaactgtgtaattgatttttttcgttcatatttaatactccatgcatgtgtctaaacatttgatgtgacggaatttttagaaatttaaagggaactatacactaaacacagccacggtgttggaaaaaaaaaagtaaagatgagatatatgtattgaagactgtgccattgactcgttgtccaaaccaacgaagaaaaagaaacagatatagtagaaatttatgtcacaagcaatgcaaagtttatctcataattgatcgaaagattcaagagttgagaatgccagaacccttagccatttttgttctagaaaatagagtacagtgattcagttaattacctccttgcttgatacaagagtggtgatcccgtgaagcctctgctgagctacttgtgcatcgaacacgttgaaggcctccggtatctatcacaattcaccacacagacactgaatttcagcacaaaaaccttcaacttctgatgagaatgacaactgaatttctagagtaattactgtacattaacaatacttgacatgtttaaccttgaacttgtccttggacctgcagtgcagaggtggcatggcgcatgtcccggtgaagagctgatcgccgagcctgtcaagatgctccttgatctccgacggcgacagagaagacgacttatcctgcttcacgtagacgacgtcctggccgcccatgctcagccccacgatcacatgcgtcccatacttctcgatgaatctgcatacgcaattatgcatcaatcaatcaggatcaggttaatcttggatgtgttgcgtgaacaagtcattagcgttctaacgattgattgctacatgatcgactacattgtgacatggtgtcggcagcatcgtcagttcagaactctctctgaaagctacggctctgcctagtaatacaaatcatgtgtacgctagtcaaatgacggcatgtgcagagttcataccatctgtaatcggttcaacgaagacggacaaatatataatacgaaaaaaagatagaatatgtatgtgtgtagaagtatatgtcaatgcattattggatcatatttaatcatctgaaatgaagcaccctgatttggacatgactgaattattcgtttctctgggtaacgcattgtcttgtcatagattcagtcagtacccagttttttttgcagcaaacttggacatctaatcgagctgctttcttcagccaccgacttgagatccccagacctggaattagtccaagtccagcaactgcaactctcaaatctgcaagtgattttccgtacatcttcatggctgcaatttgcaggttaatttaaatccttctggatcgtgcgacagaaagtccccgtcgttgttgtcccaactcccacaggaatccagaattttcaatctccatccacatgtcgcagccatgccaaatggcatactctatatttgtacctttcgatatgaaatggtcagatgtgtggcttcgaacagccacccttgtgaattgtccatccttactgatcagcttaaacttttgggttgaactgaataaagctggtgcatgcatgcgacgctttgatttttcagctgcccattgtttttgtctacttgtctctggttgggacctgacatttctagcgagtgttgcgttgttgttgcctatcaagatcatgatcctaacacgagcgcgcatttgcagcactcaaatcgcagcagggccaatcgaccactcttgggtcagtcaaggccactcagaattcagaaaagggacagtcaagaccactcagaattcagaaaagggagcaatttgcaggtagctttcagatgcatgcatgcgcttgtaaagttgcaatgcaattatttgtgtacgtgcaacaagctagctacaccattcgtcacataaaaagcttaattctaactataaatcatgcgtgttcaaactaatagctagaattagacttttttttaaagaaaggagtactcacaagctagccactaaccttgcgatggcagaggggtcccaggcgggtggcacgtcggcgaggacacctgcatcgagggcgaggtggcggtggtcgagacggaggtcaaagagggagatgaagtacccgtccatagcgaggcacctggtgtgcggcgcgtcgtgggcccacgacccgctgtccaggtcgaatgacgcgttgaactgccccgacgggatcttcccttccaccgaactcctctggttgaacagctccgacatctgcgtgcatgcgtgaatgcgtcaaatttggttaaacttttttaaaaagaaacaatgctatttgattttgattattgttgaactgatcacattcaggaaggctgaaattttggcaagattctgttcagtgatgtacatttgacggatctcttttggtgaaagtcaaacaaaggccctgtcgcagttcaaggtgtgccactgtcctgttttttacaagtacaagtgtagctattttacaggcaaatttgactctcttgtttttaaaaaaaactagataatgaggcaaatttgacttgaacttagagcaggaccactactcctaactgttggagtgtataaagtgaattatctgcctttccctattagcttaggtttttagatgtaactggctggtgcatgcagcttaatatggtattagagtaagaggtcttgagttcgaatcctggctggcgcgcaattaaataaaataattacagcccactccaatattccacgcttgagacttgagggggagtgttggagtgtataaagtgaattgtccgcctttccctatcagcttaggcttttaggtgcatgcaacttaataccaacgaaccaagcaaacataatcacttttttcagattttctgtaaagtcttctttcagaaaaaaaaagaggatttttttcctgtaaagttgattttatcggcttttattgagatactgaatatttgacactgatgggacaccaaaattaggacaagtgtttattttctgtcgcaaaaatgttggcagtgccgatatggttgatgataagtacagttcgtgagaaacacgtagaaccgcaaatgtcgtgtcaatatctaaaaatattaataagcgaaaactctgttagcatccaataaccaaccacagtaattttcttttttcttggaacagtaattttctgttaatacggtgcttctgcagtttggtgaatactgacaactgaaattatgaataacccgaatatcttcctcaattaatgcaaccttttgttcaaaaacctaaatagagcagcttcgagcaagttatcttcagctttgcccattttctatctcatatttaaaaactcaaaaatatctaaaactttgaactatctttaaaaaactaagcaaatatagaataaaaccaacgtatgatatatatattcatagccatacccatatatattatcatcatgtagggtgaattaatggtggcatagcggcactggatgaaaatcctctacccttgaaatcacgtgactttttcaatgatatgtgggcttgataaaccatgaacccatgacagtgacaaaggtatgataactttgaaagtagatgatctcaatacaaggtaaggtgctaaccttgttgaactcgagcacgtcggacttgaaccggacgcggtcgcccttgtcgcacctcacgtcggccggcacgtcggcgatcaccccgactcccggcacggtgagcggcgtcgtctcgccgcgcctctcgaccaggcagccggcgccgccgcccttgcagtacttgagcctcaggtcgccggccatgtcgaagccgcggccgaggcacctcaccgccttctcggccgccgccacggcggccatggatgatagctctctctttggtggctggctagttgactacgaccagacatgctgccattgcagcttcatgtccaggaaactgaaggagcatgatggttttaggcagaggctatatataataaggatgtcaaggatctttttttttttttggtttcctggtgtgaaactaagatatgtagctatcaatcatgaaatcaagcaagaatgaatctgtatttttttagttgagataacaaggctgcttcttgatgtttgaatggcgacttcatcagatcagcgggtagttgattgtatgtataatatgcagggagaaatgggcatgggaacggacttagtggaatggtggtggcaaccaacgtttcagtggttgactcgtagtttttcttgtatttttttactctgggctcttccaggggaaaaaagttaccttattttggatccctcggaggtaatttgaatagtttcatccattgtttttggcaccccaaaattatctcgacttaatgtgaactcattagtatacatgtgtcatgtgcgaaaatgatagaccatcttgtcgtagtcaagattataggtgtgcgattttaataggaatttataaggtacaagatccttttatcttcggtgtgtacgttagggggctctcgtatcaaaatttattgagaaaggggcgaaactcgaacctagatcgactaattcataccttaacagtactaggcagaagacaagccttatatatatatatatatatatatatatatatatatatatatatatatatatatatatatatatatatatatatatatatatatatatatatatatatatagtaaatttgtttggtgctccatggtgcccgggcaccattgttgaaattgagtatatacccaattcaaatgagtatgaaactttttcaattacttaggcattaccattaactactttactaactagtttaaagcaagtttgaactgaatttgaacttgtttttgttagattttgattctaggtatatagcatccatacatataattagttaggtatgtaatcatggattgtgaaataaagttaaatttgagttgttttgttgataagtataggtatgaatcaaattattataactaggtatatactcacaatttgaaaattttgaaaaatttgagtaattttgtgcattagataccatgttgcccgggcaccatggtgccccatatgagtgtcctatatatatatatatatatatatatatatatatatatatatatatatatatatatatatatatatatatatatatatatatatatatatatatatattaattggatccatgtcactataaatttgtccgttttgaaaaataccattaaaatttgtgaaattgaaaccatgcgattacaatttaacgtatccgaattatgctactacttaccacttcaatgcagttttatgtaaacggagaaaaattgagttcatgttctcccatgaataccatggtctaaacttccaacttcccccgtcagacatactaaaatgtttttcttgtaatactcactttgttttaaaatataacttctggtttatttacctagacatacttatataaacatgtttatgtttagattcatagtagtagttaaaaatgcttatattttgatatatttatttagaaactttatattttaggacagaagaagtaataagaaaaagtcctccatcagcggatttctgattgatcgatgctgaaatttctattttaggatagaagaagtaataagaaaaagtccttcttcatcagcggatttctgattgatcgatgctgaaatttctgacagtgtgcgccacagataattgtagcatgaatctcaggtacaaaacggcaggtgtgaaggattagagacatgtacggctcaatctgaccagatgctgatgccatcgtttgctcacactttactcaggcacacggtccagcagagacttgaagtcttgaggctttacaaggtcaagtccagatatcccaaagctcagtgaccctgactttatgttcacatggaacagtttatgagcacggcatgtttgctacaaatcatcaagtgtagaaaacgacttctgaactactgacctggtccagattcaggacccgaagtttatgactcaaaaatgcacagattaggattgcaatggacaagcacaggacaacatgatggaagtaatttggtatgctttttatttgaacgagatgatgcaaaagtttctgctgttttgggctgaacatggtccctgtttaatcacaagttggaagtatggtggaagggggtgtgagttcagagtcgaatcagttggacaccatgctttctgtctccttgacgaatccatcaccggtccagtccttgtctgattccaggcccttcctaatagccttcctctggttgatcgcctccctttgccgatgtaccaaatcggtgtgtgtggtgaaatacgggagagaggccctgagatgatgtgaagagcttggattagtgataatttgttaacaaaggaaaaaaataaaccatattttagttcaataaaacaacattatgcttttcgacaatttgaaaagagatggtcctagtgtcctctgcgagtggaaaaagtaccgaactaaacaatagctctgaaaggcttccttgagaatgagtaaaacaaggccaaagtgacacagaattaatcataaggtacacaagactttaatctacaccattcacacatagtagggtcaggcgtgcaaggcagagccattggaaggcttgcctaaacatgtcataatgaaggttcaagcccataatgactaccgctaacaacctataagtctgccttcaatcattacctcaagtctgtttttaacaatagagtgtcccgtccttgcttctacttagaaatgtggaaaataaaactgcaagaaaagatgtgtaacccccctgagcatgttcttttacaagaaaagtttcatgaacactcatgttggtgattttccatttcttcctaagttcattcgtaggcaacatatcatagtacagtactctaaactaaggtgatttctccagatgatttccaacaacaaatcaacaagagtcagaagaagggaagtggtgataacatacccccggaaatcttctattgaggaaaagttgtgttgtctcataaaatcctgcagctctgcacaaagcttctttacaaggccataaccatgcatcattacgcccgtacatacctacaatgaatggccattagtcaagtcttattattatgctgttcaagataagcatggagctaatcaattaattgcaaaaatgatgcctgaaaaaatctagaatataattcaacatcaactgtacacgagcagcacacattatgatcttcaaaatccatagtaaagggagccacataggttgccagattggaaacatgtgtaataacagcagcatcaagtagaatataaacatgcataatactaacattagtaccatgttagagcttacctgtactgtatctgcgccaagtagaataaactcagcagcatcattgccagtctccacgcctccaatagcagagagtgactgtccatcagcaaattcttctttcatcatccttgctatctgcatgactttcgcaagtgctatagggtgcacggctctcgcagaatagcctccaggcgtggaataactgtggaatcaagtggtttttataagaaaaaaaatggtaacagtaaaggaatatgttccatagggaaaaaaagaactcagggaattgaatctaacccctccacacaaggttctggtcgcaaagttttgaggttaattcccatcacactcatgattgtgttaatagcagaaactccttcacatcctgacttaagagaaattcttgcaggctgcacaatgcaagtaaggaatgaaaacattgacccataaaaaaaactaattcttggtagatcttaaaaagcacctaaatcttggtattctaatgtagtggtaattccatagatggtgatgctagggcttcaagagatgtccaaaacatgttacacgaacgctaaataataattcgcgaacacgatgtccaaaacaatgtgaaaaccgggtgggataaaaactaatttaggatctcatttaagtgctgcgaagatgtatatgtttgactaacctttgtaatatctgtaatgttaggagtcatctttgcccaaacaggcactgtagccttctcatttatccaaccgcagacctcctctaacaagtcacagtcttgtcccacggcagcacccatttttcgctctggcatgccatgtgggcatgagaaattaatctcaagagcatcctgatagaaacagatcattaacattccaacatgataagttcgaccaagaatgcaccaaaatgcacataagggaaggttaccactccgctctcttcaacgcgttcaataagctcatgccatgcagctttgttgtactcctccattattgagccaatgagtatcctgtcaggatactctttcttcagttgcttgaattcattcagcatagtttctagaggccgatcactgataagttcaatgttctgccatccgatgataggactcttagtagatccattggggtccgccctgagccgggcatagcgaggggttacgttgataactttctcagcatccaaggatacctaccattcataatcataccaacaattagccacaaagttgatgattcaaccgttggaagtgataggtgaaagtgatgactgcaaaggcactatgcacaatggaaacaacaatgtgtatgtgaaaaaggtggaaatgatgattgcaaagggttaatgcagaacaaaagaaattgaaactaatttctcatgtttaatactgaggatgcaatgctcatctcacaaaaattaggccatctcatcttcaagcaagacgtttgtcagtagtcagtcatagtgaacacaagtagtacatacagaccaaattctcctagaatatgcaaagatcctaactctaaccagccatatatataactaactgaattctcatccggcacccatcaatctatcaattctcgtatggccacccatcaaaacctatcataagatccaccaccaaatctaacgtagccacgactccatgattcgattttgccgcaaccaaaatagcaaactcacaccgccacctttcctgacatcatgttagcagctacctgttttcaagtgagcttgaattggcccccacctccactcccactcccactcccactccaaacccaacccagatcggaatcaaatcatacagccaaaaggcactctcgttaatacgcgaacttatctcaaacactgaaatgctaactacatcacatagatcctatccttgtgcgctgtttcaacggaaaattagagcaggaaaagtcatccatccaggagaattgcggttgcgagggttgagaggattacggttttggcgatgacgccgccccacccctcgtcgaacgcgcgcttcatgacggtgtagttggtgcccgggggccccgacccgatcacgaacgggttgggcatcttcagcccgttcacgcgcacggagaggtccggctcgccggcgccggcggaggcgcggacggacaccgccgcgtgccgccgcccggggacgcggcgcaacggcgcggccgtcgacggcgatgcccggagagtcagcgactccatggctggttgctttccctctctatccttttctccggcttttttttttcttcaatcgataagaatctttgggagtatcacggatgaaggagaaaggcaccgccgccttttatagcgtttttaacgaacttttttaatcgcacgcatgcttcgccatttgagttatctaaaacatgaggttatccggtggtaaatgtgattatcaattggattgcagcattctggatttggagaaaaaaaaataaaagctcgtttagttagcttggtacaaacttgctctcattaatctattttttctttcaaaataaaatttactatttaattttgaatggaagttgttttcatcctgcctcggttcggcttcccagctcgttaagggaaatagtctcaaatgatggagaaaatataataaattatgaaaaataattttaaagatagctcgataaaaaaaaactgatcaaagcttcctttttttttcccacaccttgctcattcaaccatttatgggaagataaacatcgcttgatttaaggaaaaaatggcaaatgttatcataattagatcggatttttagcaaatcgtaaattgttttataaggcatctaaaagcaagcatcgtaacgaagctgccttacgtgtcaactctcaattatcctagctgtcaccctacattaacaagaagcaacatggaaacagacactacaagttgtttcagactattattgctatattggagtatgacaatttgtttttagttccttgtacttggggtaatcaccacctttcgtccaaaaaggtaataaaattttagcaggaattggaaagcttagcgtgccaaggagaaacgatgttaacactggagaaacaatgcatagagattctccacggcagctagtgccattcggtagtcctaatccttgattttggaatagttttagctgccaacacgtcacgccgagatcagcatcatgattttagaattagttttagctgcgaacacgtcacgcccggtcactggtggttccgttgtcccgacctggcgcacatggcggaatcccccatccgtcccttctttttgttcgtcagttgacgttggttcatccatggaagtgtgaactaaacacagccttattaactggagaattttaacctttcagccactaatacagtaatacctatacactggaattctgtcgtatttgatgaaaaactaatcgtcgaaaactggggaaaaaaaactctaggtgacggaccaaatggatagaggatcgagttggatagagtgtacaaacagcatgttgcacatggcgaatctgagcttttcagttatttaaaattgtatagggacagttcttgacatgatatcgataaggttccgtaaaccagcacaatactcaactggtcccaacacagtaggaaaataggactggagagacgtacacagccaaaactcaaagatgatacgtgcataaccagcactaatccacagcatacatcctcccagaggggcatcatccatctacctatacctaccaatgcagagccaatcagccaagcagatccagaaacatcagtacaaatcacaacagcctgtaggtcggtgtcatgtatcatgtagtaggatcacatctccttctagctggaaggctccacatggcttttgtagttttacaaatcctctccctatcgccatgtgccacattgcatctaagatttgccgacttaattcatgtgttagactattagttctgttccaactctcaaaattcccagagcaccttacagagatggctttggtggtaggatctgatggaccaaggtctcagaaataatggagggaatggatgatgttttagtcccgctttatgatctttgaaatgtatgatctgccaacgatcactgcaaagtatgatgccaccgtaataatgatcccgatcagaagaacaagccaatcataagatgtagcttgcactgcatacaccctgaggccaattgtattccagaagctttcggtccacacaggatctgcagcactaaaagggtctgaagagtttactggaagaacatgccatacattgtcctcaaacttcagccgcgttgaataggcagggacatatctaagttgtcaagaaagttaataaagcaatcagtaaatctccaagtagaaatagagagtacaacagcaaccaatcaccacaaaaatacaagcatgataacaaaattcagtacatgttagttaatcaacaccagtacatgttagttaatcaacacaaaaaagagtgcgagtcaaaattactttagtgtcagcaaattttatttctttctatatacaaaaactaactggattatggatgctccagcatacatagggatgcaagtgtgcccttatcacaattctagttaattttttcttccaaattttgtactagaagcaagaaaatgaactattaagcgggtttttatatgagtagagggattgcccacttgcatccctaagcatacacttataattgcctagttcataattaaaccgctaatgcctgtcacccaaataagtaacgcacagtagggatttgatttcaacgttctaaaagggcccatagaaaaatgttacctagttctagaagggagtatgcgtctcaagaaaagaagatacctagttgtagatacaacacatctgcctccaccttccacttctgcccctacacatatttcgccttcatcatggcactgtccagtacaagagctactgttacctgccaaactagaagttctgtctgccaaaaagttccatataaaccgagagatatcatctgcatatgaaggaaactgtgtgccagcaggcaaatcctgaaaaacaccaacatagtgacttggacatgagttgcttggagaaatgaagctcttcacaattccgcaagaaagaccaggatcacatttcagtagacatccaatcaattcttctaccagtgaaacattcactttaatagtgttcagtgtgatgagatcaatgggcaagtctgcgctagcaagaatgtataatgatctggcaatcaaagcagcagcagctgctattgacgaagaattgacgtttgctgtaaaaaaaagacattacaggtttaatcctgggtttctacaaaagaaatcatcagatctctgcatggtgaacttaccagggccatccaaagtgctgtggtaaaatctattagaaaattgggaatcaaaatcctccaagacaagtccaggagttgatgaattctgcattattgatgggttaacagtgaacaggtcatggcactcagatttcaaagagaaatatttgtttggaaaaatcaatgtttctaatgaaaaaagaaaaaaaaagatggaacatcactaaattaatgtgttgcatattgagtgcaatactatcaagcaaatggttatgtttatggatatttgaggttttacctttcctaggaacgacattaatgaagatggtggaacaccaggatttgatgaagctgctggttttactttaacattatcagaaccaagtgattcactggcactttggagtgcatctaccattttcatcgaaattgacgaattctgtcaaagcagaagataaatatgaacaatatggaacaatgcctatggtgttttaaattccaatgtacagctattttttggacacccagtgtgctttactcaagaatttgagaacaaatattttgataaatctctccagaataaaatatcttcatataaagtcatgataaaaaatagttcactgagatattcgacaaaaaggaatattctgatgcaacactgaaacctaaactatacatatggatgtccacaggcccccatctactgtgcctaaattctttctgtttatccatctccaataactaaaatagcctgtacagagtggggtatcaaccactatgacactaacaggaactgaaaaaaaaaacattttgaataagcaattacattcaccaagaacaggcaggggaaataaccacaaaaaaggcttacccctgcagcatgcgcataaaatagtggatatccctgacttatggccttgccaacggaaccaatctccaagacctgaatcgtgtccaaagcacttgcttaaataatcatataattaagttatggaacaatgtagacagatacttgcctaaataatcatataattaggttatggaactgtgtagagacagatatatgtatcgcctgaagactcaggactatatggtaaatttcacaggtttaaattcattaagtccacaacctaaaaaactgcagaaggacaataccctgaagcaagggacatccaaggaaaactatatgtttgaaagcatttgcaaatgatttagtgctgcaattgcaagcgttatcctatcaagcactcacctggtcaatcaataagctgctaatgccattaacagagtcagccccttgatctaattcctgtaagaatttccggctaccaagataaccccaggcttcaccattgaaaacagcaaaaacaagctgcatatcatgtggtatgatgtgagaataagaacacaacaatttaggaatcaatcaccacaaatccatactaaaccagatatgaatagccatattaaatctaccacgccatgcttagataaaggacaatgattgagatgtcaagggctgcaagttcaaaatgagtatcataattcacaaaagaaacacaaagtagctagagtagacctgcaacactgctctagcagatgacagatgcaaaagaacccaatgcaataacatgcacacaacttacagaataatttctagtagtaataatcttacctgtttcttaagattacttatatcatgaaggtgagagagagcatcaacagcagtgagcaaggcaatcaatccctgtgcataactccatagttatttcatagaactataatgtaagatgcagttatcatacccacaaattagtaggaacttacagagatgggagaatcagcaccaagactacggtcccgaaagaatgatgcagagtcttgggatgcagtgaccattattattggtttctgatgctttgtagatgaattgctgattggtggtaacgaagtccatacactgcccttcaaacatgagaaccaaaagttgaaacaaaaactagctaacagaagacgataatactcagttggcaaggtagcaactaccacaacacattgtggaacttaaatatatccataactttccaaaacagaggtgcaaatgcctatgcaagaaaaaaaaagtggtcacctctgtcctcctaaaggcaagcatgactgctctctgaggcaggactctgaatcatgcgtcccagcttttgttgtctaaaagttcatgtcaattaggagaaacataatccattatccatgcgatcaaaacatacagataaagatgtgcaagaaacatagggagaacatttcatgtgaaaaatcaaaacctgcataacgaggtcaaattctgcaacatttgctagatatccattggcactcttctcattcttgtccgcaagctgttattgataatctctttttagagtcattgcattgtgtagctggagtttgtaaagaagaaatgagaactataataaatatataagagcaggcagaatacgttttgcagagtctgtgtgctctcctctgagagaagaaacacaggaaagtcatatttgttccacataatacctgatccctacaaaagtaaatgtcagggtaacagagtgatattcaatgcatgtgatcagctgatcacgtttgtctctcaacagggtggtaccattttaatcaaccgcataacttaccgtgggattccaatgatggctgagatttgagtatggtgcaaaagcctgttgtggaaattttctatccggtgaaaactctacaaagtcagaacagtacattatttttggaattaaaaggcaataaaatacataaaaaaaacaaatccacaaacctagcatgttatcaacgccatttgcctcaactagtacgccagctatcttacgataaagttctggatcattggataccctgcacaagagcaaacaatgtagcaaatattctcatctcttagcacctcaaggaaacataactttgaaagacgatcatatgtaacatcatttgtgagatttagactatctaagcaattatacctcagaaagaaatctgtcatctgatttaagggaagaagaaccgccgacggctgaaccaactgatcatttctgtttccaaatcttacaatcggtgcaataaccttgtcatgcccaggatctgattacataatggagaccccaataaccatgtactcttaacaaggcagagttggctagcctttgacaatgatgatagaaaatgacagccatcttaatttaagcatacagaataagagtaaaccgaatactcactagaacaaccgacttgaccagagtgattcaacagcctcacacaagggaagctttcaacgtttatgtacattgccttcacaagatccggaactgactccaacgttgcagcatctcctaaaaagaaaggtaagaggatccttaagttatggtacatcaatgttacagcagtcataagttgggatatcttacgttgctttgcaaacctgtgtcccatatataaatatattaagacagtaagcagtatcacgattttataattcaaatgaacctaaacaaacctacacctaagacatcacaatactttagcaatcacaaaacttcctagaatgagatactagaaaaaaaattatagtcgcatgtcaaagctccatgagcacaactagaggcctatcagcacaacaacggaggtgttcgcccaagcttcagaactaactaggtttagcagtccactacctaattcacctcaaggctacgctgagacctaccccctacacaatttcaccctagaaacgcatcacataacagaagatacccaacgaagcatgagaccatctcgattcggtagaatttgttacaccccagagtccagagcaaacaaagcgatatagactcggcgatggtcagtagaggaccaactcaccggaggcgacgggagggaagacggcgaggaagacgcaggcgaaggccgcgaggaggggcgccgtggagccgccccccatggcggcggcggcggcgatctggaggagtggaggaggcagtggtcgtcgcctttctcgtgtctcgtcgacggccgcgacccggtagccggatgaacaagcaggggaaatgacgaaatgtcgttgggcttttatgggcctttctccttcggcccattaggcgtcacaaacaagcccggcccaaactggatcccctctactcttcgattaggtccatcgccgccgccgccgcctctcccatcgcttccacctccgagggctgcaggctcggcggcggcggcggcgtcggcggcgcaccggcttctctctgccggagcatcagctcgctccagcgagttgtcccttgagggagggaggtgtccaatttcaccacgcgggccagcaccgccggcttgccccctcgcggacgctgccgacgtcggtgagcaccagcttacagggtgagttccttcccgggctcactggctcggatgtccctcgtctgcatcggttgtgagatttttctgctttgctctgcttgtagttcgagcatggaggacagcaacacgctgattctgccgtgcaagaggaagaacaaaggacaagggaaagacaaggtgctgccatttttatttccacctactgtttgggggtgtgatgtgtgacttatgctacctgaattgccaggatggtaagaaaatcaaggaagacccgaagatgagcaagagtaagctgaaaaagctgcagaatttggaggtgcgcctcccttcttgacattccttttgttgatcattggtcatagtgtttatgttaatgccaatcatttttttcttatctccaggaggaaaagcaaaagaagttactgcaagctcaaagtattgagattttgcggtatgttagtctttacttactctgtctggactgatagtatagtgtattctgatggttgtcctgcatgacaggaagcacaagatttcagatgatgcgtattctctgctccatgcttctgggactatcggtcaagtatagtagatatagccataattcttggattcgctgttttctcaatgtacaaaacaaagcttcaatagacatttattctactgcaggctgagaccttgaaagaaaaacgtaggcgtgctgtgcacttctccaaggctggtttgaacgtccctgaagaactctcactattaaagaaagacggcgatcagaaagcttctgaaaacagcgaggctgcagaggaagattacctggacaagattgtcgattcagcaaaaaacgaggatcctcaaagaaaatgtaacaatcacatagataatgttgcaatgaaacctgtggaatgcaaactggttatagatgttggactgagcgatcaagaaccaaaaactgaaggtagtgatggtgttccgaatatttcagcaaatcaggcaattcaatcatgtgttcctagttgttctggtgaagagatattacaggtgatcagtctacagctgtactgtgttttttttcacctgttcatcaatttctacatgtttttttttgtaaaaaatgttggattcacctgttgctttagtggtattgcagtcagaagctgtttggttcatttcagagttattgtaatcctgtttttgttaggataaagagccaggacaagaagaacgtactgtacaagagtgtttcaatcctccaattgttgtacctgtgtcaaggccacatgaggttgagaaaacaaggagggatcttccaataataatgatggagcaggaaataatggaagctatttatgaaaattctgtggtaattctatgtggagaaacaggctgtggtaaaactactcaagttccacaggtaagtgtgtgcaccttcagataccatctgcttgtattcattgctcattatatgcttcttgttgtctgcagttcttgtatgaagctggctttggcacaagtaaccggtctgacagaaaaggaataattggtatcactcaaccacgacgtgttgccgtacttgccacagctaggagggtgtcctatgagctaggtcttaagctaggaaaggaggtcggttttcaagttaggcatgataaaatggtaggaagtaaatgctcaataaagtttatgacagacggcattttgcttcgagaggtccaggtaacaatctgattacttgtcttggctactcctatattgtctatttattgaagagacatgttttcttcactctacttattagttaccatgattaacttgtgaaagaaaaaggttaacagttaagcatgattagaaaatgcacctaagggaaaacattcaaggtcataactgtcgatactgcaagtctcccttgttccctggacagcataactgccctaataaggtttagttttcctaccagctattctgtttgacacttgattaatcgccatccatatttttctataaccactcaatcatggcttccataattgctttataaaatggtacagcatgtgattgatcatcctgaaatgtctatgtatttattttccttttagtttgaagttatttttagacgtatatcagaatcctgctaatcacatggtttactaatcatccgcagagtgactttctgctgaaacgctattctgtaatcatcttggatgaggcgcacgaaaggagcttgaacacagatatacttatcgggatgctatctagaattataaagattcgcaaggttgaaactaaatacttttcatcgttttcattagaatgaaagaaaatatatatatataaccattgttaacatttatgcacatgacagtcattgtacatagagcaacaggaaaaaatacgttgtggtctgagcattaatccagaagataagattagtcagttgaaagtggtgctaatgagtgctaccttgcaattgaaggacttcatttcaaacagaagattgtttgatgtgatcccaccagctataaaggtacctgtacgacaattcccagtaacagttcacttctcaaagagtacacatgacgattatttggggcaagcttataaaaaggttatgtccatccacaagaaacttccacaaggtggaatccttgtctttgttactggacaacgagaagtcgattacttatgtaagaaactgcaaagagcatcaaagcagcaaactgacaagaagactgaaaaagttgagggtgatgagaatggctcgagccaagaagtggtcgagagggaaatcagtgaagcatatgatattgatagagatgagtctgagcaccaagatgacatgttttcccaatatgatgaggatgagagtaatgctggcccaggtgtagattcttcagacattgaaatggaacctgagatggataccgacagtgaggatgatgattctgtttatgaaaccacagaagaggatggaccagtattagcatttttgaaaggtgctgagggttcatctggattgaaggcatcatttaaggctatatcaagagtgtcaggagaaccggaaagcactgatgtaccaagcaatgctacaattttagaagagtcaagtcatgttccttgtaccagtaaatgcacagaacctaggtctgtttcgcatggtaaacttcgtgtgttaccactttatgctatgttaccagcttcacagcagcttcgagtgtttcaggatattcctgacggtgaaagattagttgttgttgcaacaaatgttgcagaaacctctttaacaattcctggcataaagtatgtagttgatactgggaaacaaaaagttaagaactacaaccatgctactgggatggcaagttatgaaatccagtggataagcaaggcatctgcatcccagcgttctgggagagctggaagaacggggcctgggcactgttaccatctctactcggctgcagcatatggtaaagatgaattattccctgagttctctgagcctgagatcaagaatattccagtcgatggtgttgtgcttatgctcaagtttatgaatattaataaggtaatgtgcttgcaagttactcatccttatgagattataggttcttttgacttattatctttcttttctctgttgtttcatgcaattcatgataattacaggttgaaaactttcctttccctacacctcctgacaaggaaagtttggttgaagctgagcgttgcttaaaagtattggaagcgcttgatagcaagggtgaacctacattgatggggaaggctatggcacaataccccatgagcccccgacattctcgacttcttctgacaatagttaaaattttgaacagtcagcggtgcttttccagacctaacttcatattgggatatgcagcagctgctgcatcagcattgagctttacgaatccttttctcacgcagaatgaatttagtggtgaatcaaaacaagataaccctgattcagaagataaggataggcaggaaaggaagagacagaagaagctcaaggcgatggttagagaggcccacacaaaattttccaatcctagcagtgatgctttatccatctctcgtgccttgcagttgtttgagttgtcagaaaacccagtggaattttgcagagtcaactcacttcatctcaaaacaatggaagagatgtcaaaattgaggaagcaacttcttcgattaatatttcaccatagcaaattttgtgaagaattttcttggaaatttggggtttctgaagatgtagaagaggcctggaggcatgagtctgataaaaaaccaatgcaattaaatgaagaggagcttctaggacaaggaatatgtgctgggtgggctgatagggttgcaaagaggattcgtgcctttcctggaccatcaaaagatgataaaaaggttcgggctgttcattatcaatcttgtgctttcaatgatacaatatatctacaccgatcatcttctgttgcacgaattgcaccagaatttgtagtttactcggaactacttcatacaaagagatcatatatgcatggtgtaaccagtgtaaagccaggatggattttgaaatatgctagttctctttgtacattctctgcaccattggaagatccaaaaccttattacgaacctcaaaaggaccaagtctactgttatgttagccccatcttttctcggcataattggcagcttccattgcatagtttacctatacaggatggcaccaatcggttgcaggtatttgcatgtgctttgcttaaaggagatgtcttgccatgtcttaaggttattcagaagttcctggcactgtcaccatctgttctcctagggcctgttagccaaagaagagttggtgatcttcttgacaggatgaagattggttcaaagttaatagatagccgggcagcattaagagatgtgtggaattttaatccagattttctttatcctgagataaaagcatggattcaagataaatttcatagccattttggagcaatatgggaacaaatgcataaagaagtagttcttgagggcgatgaacttttcccaaagaggtacaagaaagttaaaggtaatcaattctagaagattacagtgcaattgcttgacagaagcttcttactaggtggagacatctttgacaggtaacctttgcaaatgactcatctgacattgtggaacctctatattgaagtagatgtatatatcaattcagtaaggttaaaatagctcatagtgatgagtacaattgggtagtaatatagtgatatcaagaagctctggctcgtgtagatgttgatgtaaactggaatttcattcgtttcatcatcgctgtagtattcttggtcactgccaatataatgcagcctgtgtggaaagttgtttctgatcttgccttctccactgcagcatccacttaagctgagaacctctgtgcccaaatcctggaaacctgagaaatagatgatggcttcgccaagttcgccaactggtatcagtgcagccatgacatattggcattgactgcaaatatgcaatcatgggattgaccactaatatttcagtagcagaaacaaagaaacagggatagcatgtaatctttgatagatagtgccgtggaaggatattgtagacattcgtcggatgggtaatgattcattttacctcaccatatgaacgagtctctttgaccatgtgcagttttctctctagcagttgcagatacagatggcagtaaccagttaccacagcatgattgttctacagtaatttttgtaagcaactgctagaatattaatgataattatggcacagtaatttttgtaagcaactgcaagaatatcaatggtaattatggtggcagaagttgccccattttcccttgttgaggcaaagggtgcgattgtttgtttgttcacagcacctgaagatgaagaattgagtattcctgtaaaaatcctctgcacttctgcagaaacaaacacaacagaatgaaaaagaaaaactgaacttttccaaactgtagaaatatcaagcacgtgttacataatccctgcaataatacgagggaaagcatagtagtagtacgaatatgtaagaccgtattaatctgtgacatgaatccctgcaataataggaggaaaaacataacagctactattcaaaccattaacgaacggcccagataaaaggatgggacatgataacccggtctaacgatcgatatataccgtgggtgacctacttcccctgctcgccgccatcatccaccggaggcgccgccgggcgcacgcggccgccgccgccgctgccattcgccgctccgcccccgccctgctgcgggaggaggaagacgaagaggccgagcatgcggcgcacgatccccttcagcaccgagcccctcttcgggacgtagcgagggtggactcccggcggaggcggcttcttcccccctcctactccgccgccgccgagcataacgagaggtgaggtgaggtgagctttacaccggattcgtggtgatagtgagcaaacggccataccataccaacctcgtatttatgaactcatggtggcactccacagaggagcagcgaaggaaaggctggggaagatggcgggaactggagcggaagtggcgcgagatggcgacagcgtgagagcgtaagcgagatgatgagcgcacgactacgtctgaacttttttgggggcggtttccgcaggtggaagttagcgagtagccatcggccatgtggcgccatggccgtcgcccatggccgtgggaaaagctcaacgggcccctccgatttgcggctaaaccgttcaagacgtcgcctttctgctgcactcgccatcaaattcatcatcttttcttcctcttcgtgcactgtgggacgaaggaagcatctgcaggagcagtgtgtgtggccgtgtgtggaggtcggtgaaaaccgaatacaatgatgcctcaactcaactctcgccgcaaacacggtcaggcaagactcaagagtgctacagtttattggcgagcttgtttgtagctggcatgaaaggacgctggtcactttgttctaccaggtgatggctttctgttcgtttcacatcggcaaaccgcaagtggcgaactggggggcagattttacatggaaacgatagtgcagacggcaggatggagagaataaaaataacactggaactatgagaaagggagggcaactgggcaagaacagcactggaatcctggaaaaagaaggagagaggaaaaaaaaagattatccttactctatgttctttggaaatttagttaccaaagcattttttttcggtgtgcaaaatttagcggtgattctatgtccagtaggtacactgaagatgagggcagtgaccaagtgaagaaacattgaaagattgacttcgggtcagggtcagtgtcccggagagaaactggtcgcgtccagtgatcggatttaatgaatgactctgatcgagccaactaatgagagaagaggaactgtaaaaggtcagtctgaaaacctgaccttgacttctgacttctctcacaaaatttgagctggcgaattctgtcttgtgcaggcaacattagttcttgcccatgttcatcccagtggcaggttttcttcgttctgaatgtactgactataaaaggcatggatcgtaccaaattgttggagaatgtactatactactgaagtactgaacggatatttgaatttcagaaatgtgtttagccacaagctagtactccattccaaaatagacttattcagatttatcgtagtaatattatatatcacatcccatattaaatttctttattttggaacggatggagtacgtgcttaagtcttagtactagtttggatgaactttcatatgagtaaatgggtaatagctcgaagtacagaataagttaatgtgatgcagtgttctctcacgctatattcaatgaaaagtcacaattatgcgctattttcccttcaaaaaaatgtaatacaggtcccctagttcatagttcatacatatccatcaaaatcacttctgaataaaggaaatggaatacgatgtcaccattctgcttcggaacaaatcctttccttctgtttacagtaagtaagatgatgttgatgtatagtaggacaagtgtaggaaatgtggactctggtcaatgttgagatgcgttgagcagaagtaatcaagtttattgatgatgcagctgatgcaacgctgtacaattgggctaatggaattattaccaaatactaatgattcctttccagaaacaaaaaggtaatcaatctggttgaagccactggatgcagccaagagcccaacatggctgcagatccggccaccaaccaaccattgcaacagagcaagaactaaacaaagcaagaaaaagtcaaagtctaaaagctgacttggacttctgacttttccccattatttatttttgtcctacgtagtctttttctgttataaagaaatcacaactcgcaaacaattctttgcacctgactggttctgcgctttctgctgtttagtctacgattattcagagacgcagcatcaaatgataactaaacatctgaaacagaacacctgaaaagtcctgctctatcaatagaacttcgcaccgtctcgttaagaaaaagaacacctgaaaaggctgaagctgaatccagatttcagaatgcgataaggccctgaggaacacaaatgaaatcacgggttgccaagaaggcaacatacaattcacaaagctaagtacaaacaatcctaatgaaacacacgcgcggtccatcgtgatcggttgccgtgtctcgtgtgaagaagctcgcccagcaagaacctaagggacgggaaagcgaggcgctaaccgacattggcagttcggtcggtacaccgggcctcagccacgcacgggctttcaccggccggccggaagaggccgggtcttggcggggcggaagcagccgaagaaccagcccagcacgctcttcagcacgactcctctctgcggcacgtagcgcgggtgcgtcgccggtgccggtgctgcagcgccgcgagctttgccgccgaacgagctccgcattgtaagctggtgatgcctcctccgctccttgtacgagtgtatcctcctcttgatcgggacggcgtcggcgacagaactcggcttagctttagctgctgctctctctgctgcttgggagttgagagacagagagggatctgtggatgaagcgtgcgggggaggcagcttgagctgctgcgtatttaaacgggcgggaggaggcgaccgggtcgtggtggtgaactggacagctggtggtggcagtagtagactgcaaaatttctagccgtggaagggttggtggtggtgactggtgaggctgagagcatcgggatcggtggaccggctgtactacagtacgattgtaccggtgaccacggcgcgtgcaccgcatcgggtcgggatccgaaacggtcctcgctttggcgccgcgtttgaaaatgttcggggtttcgctttgctgccctctcgcctcggcggaggtttgagccgatcaacgcttgctccggggaggcgactctgcgcgcgagcgcgacagaagcagtcgccagcggggcggggcgcggcgcggcgcgtcgtggcgctttcaacagcagtggagggagcggccgtttaggttggagtgggctgagctgttcaacgaaacaacatcagccaactttcggttactgggcctcatgttacgcggcttatatagagaaaagtccaatgcaaacatcaacggatgatagttcggcttaagaatctaaaaaggaataaaaaggaataagtctatttttctctctctctcttttttaataatggaatataatatctcaacctttgctcaagaaaagctacaaccaattattacaaagtaacactcgagataagagtgtagttcaaataaaatagaacacatcaaacatttaaataggaaaagccaaaataaggagaacacatttatttaagcctatttgtgaatctccctcttaccttacacctgattgaatcgcatccttcaacggtttagataatggtttcattctatgtggtgcctacttagtaggctgacttactttggtactgacgtgttgcatgtgtggcattatagtaaaaaaaataaaaagaacatagtagggcccactccttcctctcctacctccctcttgctctttgtctcatcccgggctcccggtcggtgggcgaaattgcagaggcgagcaaatcacgacggtagcggtggatgcctggcctaacccggggcaacttcatcgcataggtggactagtactcactactcggcgaactcacgtctagcacggcctcgcgggtgtggaggcgaacaggcgtggcggccatgtgcggcgagagaggggaagagcgccgggaggatgcaggacatgcggaggttcccactgaggtagcaaggcacgacgatggtaagcacgagccgtcaatgcgcattgcgaggcataggatgtcgcgtggacggataggcgtgccagtggcttcgtgctatgcaggaggagcccaatgatgttgttgagcatcgcgctgtcagagaagctcccatgtctaccgtacgtcaattaacatgtatccaatttgttttgatggagagagagtcgattgatgtagataaatatgcaatagcgaaagtaatgataatgaatgagcataaataccagttgtggccgaggaagccttgtactcggcctcctaggtcgacgaagccatctttgccaccgtcgtggtcaccagtcggtcgagcggcgagagtgcaccagattgaacgacgatgtacatatgtcgttcatttgaaaaaaaagtgttaactagagtaggcgcttacatgtggatcctacggtaaaccgcttcccaaaccacctatggagttgatcgatttgaaccagttttcaaaaattgaagaggtattatacccgtttttatggttgagggatgctattcaatcaaggatgagtttagggatgtaaatacacttattccatctgaaaaataccaagcgtggcattcttgctgcggatggactaatccgaattcagcgtagaccattttgggccaatcccgttccgagcccacgttagaaaccagcgtaactagacaggccgtgatgtcgtgggcccagaacaggattgccgcctacgtgctgaatgggcctacgcatttagggcccataattgagtatgcgcaaaatggggaataagttcactctgggtctctctatttgtcgcccagtccgattttcgtcccttgatcacaaaaccggatacaacgggtcccccaacttacaaaaccgtgtaaaagagatctctcggcagtattgtgcctggttttagatgacgtagcgcctacgtggctccctttaactaggtcgtcgacccacgtggcatttacgtagcgcttacttggcatttggatcccgggaaaataataaaaaacagtgggacccacatgtcagctaaaaaaatataaaaagggtgggacccatgtggtctcacatgtcaggctccctcttctctctatgcccctctctctcccctacatggtgtcacaccctgaagttcttctcccaagtctaaattgaatttataaatggtctcaaaaaaataccggtgtaagagcaggagtgaaaccctaataaattaatgcaaataataatcggaattggcatgtaggattttcgtgagttctacatgtcgaaatatgctaacaagatttttagtggaattttcagagctctagaaataattttaaccatttaaaaatgagcacaagcattatttaatccctggaaaatcctttctttccttttcttttctttttccctcctttttcttttcgaatgggccgccggcccattctcttcccctccccctgcccgccgggccggccgaaggccacggcccagccaagccggccgcccacgcccctctcccctagggtcaccaacaggtgggccccacctgtcgggcccgtccctaacctccggtcgccgccgccgcatcccgcaaccgccgccccgctcgctcccgcacctcccgggccacgtcgcccacgtcgccgccttcccccgcgttccccgcgcccactccctctctctctcgcccgcgtccacgctcgagacggccgggatttaatttttgaatcccgcctctctctcctctccacctctccccactccgccggcgaaatcgcagccatcccggccacgatcgacccttgtgagcctatataaagcattcccattctcccctctctctttttcgttttgcaatcacccgctcccgtgctctctttagcactagcgccgtcgcccacctctccgccgcctccgccgttgctccgaccgccgctagctgccgtgccgagccgcgccgttgacgccgtcgcgttcgccgtcgagcgggccaccccatccacccctctcccgtcggattccgccgccggaacccatcccgcaccgtgcgccggtgagttcggccatggccgccgcctttggccggcgttcccgccctcggtgatctttctcttcccctctaacttctcccactttgtttcctaggtcatcccgaaccccgtccgccgctcgtcgacttctctccgtcgagtctcgccgccgttcaccgtcgtctccctccacgccagtcaaacctcctcggtgaggacaccccctccttcttccccctctcttttcctccggtagcgccgccgcctagtcgtcgcatcgcgccgccgtcacccgccgtgcgccgccgctcaccgtcggtcgccgccgtttgccaccgccgctcgcggtagcgttgccgtacgccatggccgccgggccggcttgagccacctgtgcgcgccggccgcgcgctcccgccgccgagggtagatcagggccgtcggttcgggcgcccacgtggctgccacgtggccgtggtgtcggccccacgtcagcgccacgtggtacgcagccccttccccggttcgtggacccggtccaccgcggaccgccacccgagtcactgccatgtggggcccgcatgtcggtgccgccccctctctctcccagggttttaattattgcgcaataaatcatttaagggtttttctgtttatagtaaaaacacaatgaatcttctaaaattcatagaaaattcatccgagctccgtttaagcccattcaagtctcagtaaatcaagaaaaatgcaaagaatccattaaaaatggttttattctctgtttcagtagtcttatggcctgtttgtattgtttgctttgtatgtcgcttagattccggctctcccgacgctccggtgtactttgaaatagtcgccgaggttcatccagcagcaaagcaaggcaagtcatgcttgtcacttgaacatgttgatcctatattgcaaatgttctatcgttttcccttaaatactgcattgttttataatgttactatgtgatatttacctactgttacagccatgctatttttgtaccatgctcctttgttagcttaggatataacatgacgagatattggactagggattgcttagccatgcttagttcaactagcacacaatgggggaattacattaatgcatagatatcagattctagtaatgatgttggttaatgccaccgctccggtgttggttaattaaaatatattaaatggtgggctgtgggtgcatggttttgatggtcgcgcccatggcacataaggaccggtttgcggtatgccctggaagaacttatcgtacttacaacaagccagcgtgcgcaacggctgggcttgtagggtagctttcctctagctgacgcatctaggcaagggtgggtgtgatggagtttggatgggccctgcgatggcctatgcggcttccggattcacttaggcacgagaggggactgcccgctgccttgcgagtagtgggggtgaaacctgaggtgtggtgtgcttggttagagggggttatgcgaagggtcctgtcacggcctctatccggtatgtcgtggtggcatgtcggcgcacgaaaacgtgtcgtggggctttgtcttgtgggtacagttgtacacctctaatcagagtaaaactattcgaatagccgtgcccgcggttacgggcggtcaaccagattcaccgtgattagtctcaccctagcttagtctaatggaatcgattagttcaggtggatggttaggcctgttgcaacgtggggtagcgttgaacagtggatggttaatattgatgaattattataactgttttactgcttttaactactgcctttaaatgctcgctttatgcaaatgaaccactctagctatcctttggttatatcctgcatcataccctctattccggtatgacttgctgagtacggtggttgtacttagtcttgctctattttcccccaaaccccagagtttgagtacgtgtcagatggtggcttctccgaggagtaggcttcatccgtgccgtcgaggatgcctgtgaagtggcgttcccgctgcagtccaagtcaaggcttagctccatttatcttttaattttccgctgcatttatgtaagacttttataatgtttgtaagacgtggatctgtacgtcaactttatcgtttgtgtaccccggccggtcctggacgggggttttaatgcacattctgcttggaattctattcgggaatttctgggcgtgacacatggcaagtagaagggcgagcagtggcgttgccggcgcatagggggtggcaggcagagcggcggcgggcggcgggcagtgggcggtggacgcaaggacggcgggcagaggggcggcgggtggtgggcggaaggacggcggtcggtgggcggagcagaggggtcgcaggtggaagtggagcggtggcggctggcgaactgccactactcttcggccctcccgccggccgcggaggtggacatggcagactcggagccccggcgtgctcccgcgccgcctcctccctctctccgcgtgctcgccgtcggcctctccgcctcctctccctctccgcatgcgagcaagcgagccatcggtggcgttggcgacaagggcggcgcaatggatgaggccgtctgtcatcgtttaccgcgctcccctccgcctcctccccacctcgccgaggcgtcggtagcaaggacggccagcgcgagggagcgtagcctgtgggaggaggaggaggagcgtttcttggagcgggggaaggaggattgcagcgtcggctgctagccccatgacggcgtggggcggcggcggccatctttctcttgcgccgctcgtctagccgtccgccgcccttctcctcgatggccgccggcgggagaagagggagcggcgcgcggcggcgtcagcggcgagagaggagggaggacgacgagagaggagggaggggagagcgcggcgtaggcggcttgtggagcggcggcgggaggatgagcgcggtgtagaggcgctcggtgatgctgtcccggtgcgcgcggagggcgtctgggtggtcggcggcagcgacacgggtggcgacgtcgatggcatcttttagggcgccgccgcgttgctcgccttcacgcggaccggcggcgctccggtcggggggcggcgccgaccacgcccgccgccgccgccggagctcgcctgctccgtcgcccacccgtgccgtcctctgcccgggaaggagagagaggggggaaagggaagaagagagagaagggagagggaagaagagaggaatgaggctgacatgtggggcccccaccatttttttttcagctgacatgtgggccacactttttattatttttccgagatatagttgccacgtaagcgccacgtcaatgccacgtaggacggagacctagtcaaacaagccacgtatgcgtcacgtcagccaaaaccgccttcaaaatcgccaagggaccacgtttgcctagttttcataagttgggggacgggtcatacctggttttgcggtaagggatgaaaatcggaatgggcgacaaatagagggacccaaagtgaacttattccgcaaacggggaaaggaaggacttcatataggccggaaactccatggccttcttggagcgcgcccattccgccaatttgtaacgtgggctcggaacaggattcccaagtacgtgcgggatggcctgacgacgttatcgcctccagtttgtgcagaacagcaggcctcctatgggccgagatcttcacggccctgttacgagagcgccatctccgcagattcgagtagtgggctctgaacgggatacagacgaacctgcggcccgttaaattcgcctggtcacggcccggtaccgaaggtttcagtgtatactacttcaatctcacgctgtagcagcttaatttggttatttcgtagatgaaccaatcaatcaaacacggaaataaaagaagagagatgtgcattaggtgttgacatgttgctgcatgctagttgctattgcagtagtgatgcccttttctagtcctgcttttcgcgaacgcaaatctttaaaacaaaattgtatgtggcgtaggaatacttgtccagttacatagttaaaaaaataaagatcttttagggacaaagagaatagtatatagtacttcacaaatcacactgaagtgagttactccaagaattttaaagctaagccagcaaaaccaaacaacattcttaatttagtccatcatgattaacctcggtccttggaaattaattaaagtgaaaagatcactgaatttataacccaaagtgtccgtcgtcgctgaaatttggaatgatcccggtcgagtataacagggacagatccgctagacgtcaatcgcaagattttcatactgacttcacagtgagttctgtatcagatgagcataatcttgagtattgactcagtaaatactcttaccttaactaccgagtcacaagtcaagttacctataccgtgcggtactcgtaatcaagaaacttgctatatgtgtctcttacgccttacgagttaccatgtcagcaatggaagaatgaatgaacctgcttttagtttgcagtcgcgagtagtgactagcaggtcaagtttcatgctggaactaagttcagatatcctgtcgtgttttcaaactagaaatggacaccatgatcgcgagactgttagaaaagtgagagatgtcctgtctcgtgcagtggaacagtaggaaattaggaacacttgcgtgcacaatgtgctcaagcaaaattgaatttgtttggaaaaatgttgtaggaataaattgcataaccagacccttttggaagagaaattttatgtctcttaagaaagtatactagtatatatataaatttacactaaaaattttggtagctccaaatttacactaaaaattttggtagctctaaatatttagtaccatgaagataccaaattttacattagaacttgcatacatgatgtggtatttctcgatacattctcaataataataaatttattcttttagaatgcgtagggcagaaaaaagtgtaaaaaaattgaaatgacatgtttgtttaattctatagaaaaaaagaggaaaatataagataaaccctttaatatagacaagttttggcacgctcaaatctgatgccattaatttgtactatgtgaagaaaaggtagcaaaacaaacatccatatggcactaaagttgccaaaaaaatggtagaattggcttcagtccaaacatggtgaaagcaaattaaagtgttcaaaatattatacctcttgcttattttcctcgttctagtttttctataagtcaaatattagtatctttgacaattaatttcaaaaagaaaaagtttatcatcataagatttatgtttcttgttttaccatggggaatacttttataatatacggtttgcatgttgttaaactatatgaatttaaaaaatggtgaaatatttataataataattgacttaggacaaaattataatgatataatttgaaatagagggagtaggaaagattcgttaggaagttgaatcctacaaaatttatatgccaagccttaattccaaaattatgcctttgggattagaacgggatttctgtaatctatctcaacatagcataggaaaacaaaataaccaatatttcagaatgtggaccatattgagctaggaaaatgtaattctgatcattcttcccacagaatgcagataaacacacaatattgggggcattttcttggaaaatttgcaggactttgacttgaataatatatttgaacaataggaggtctgactgagcaacatctcaggcaagtacactgtcgtagttcacaagaaatcaagttttgaccatacaacaccgagttgtcaaatagagtacatacatacactgcattatcataccaaacacttgccaagttgccatgaggtcctaagtcagggaagacccaacaagctaggtctcgcttacagcaacgcattcagaacacgtaatgcacttatttctgcattagtacattacattcttcttcctgttcaggcagcggatcactgcaaattggccaaattaaaatgtttccttgactgaggaatctctgctaggtttctgttacgcgtgccaggggaaaacgcggtagcgcgaatttcagatttccccagtacgtaccagcagcctaacatgagacattgcatctgatgagttgaaaattcaggagcttagacttggtacctagttcttcattttcagtctgaatttcccactgacggcgtcaatcccttaaattaattccaattactaacgccgattcaagtggccaccgtaccgagcaagcaaccgccgcctgccactctaatatctatatataggcttgctccaattcagtgatgaacatatcagaattttgagaagaacattgtaaagttcagtaaagtttcttagcttttttcttagtgaaagcgagtagaaaagacagaaggagatcagggagaagagcggcgaaagggaagtaaaagatcatggccgtgttgatcaggaagcttgttctgtcactgatcgtgatggtgatggtgttcttggtcgtgtctggcaccgcggcggcgcggccattggtgggacaggaatggaccggagaagacaccgccggcgacgactccgtcgtcgtcaggtttctccggcagctgtatctgcacaagcttgctggtccaggtcactcctgcaagacctacagcccaaacggtggatgctgataggatcgatggtgatttggtgaagatggcttggaagctagctagtagctaatttgtaacacagacatatatacagcaattctttttttctttttgctaatatatacaacagttcaatttgtagatttatttcgcttgtaaactagagatattatttttccccggtgattttttttccggctaagtagattataacgtgttgttgtttcgatagggattgaaattttcttgttgaaacgatcttgtggtgtagaaatttcagtggataaccctgcagctgtgtatagaaaagcttatatcaaatagaaaaagacattgattaataccgttttgtttgcatacaccttgcctacttctaatgaagaatttctgttcgatcctttcgatatttttcacttctaatgatgggatcgaacagaaattctcttgagttttgctagttccttggcttgaacttacaaccgagggtaaaattcagtcatagataataaaatccgcagaggcaattcttcgctactggcccggcgaaaaaagattaattcagtcctcggtaaatactatgcggcttcctcgtgttggcaactatatagcacatctgaccgacgctatgaacgttttgatttgtactaaagaaaaaaagaaaatgcaaagtttaagaccatgagatgctgccgtaaagtcgtagaccgcaatgcctgaccagaaactgcatatttcacggagcagagctgcaagtcaaatgaaaccgaaaagctccctcgtgccaacatccaggatctgtcttcttttccttctttctgtcccactttgcccaagtacactgctctatctgaacctatcgatcgatcgctgataaaataaagaatacctgattcctgaagaaaatagcacattgtttaccgaaaagaagaagtggcccaaagagcatgaacccttactgatttctccgttaatttctcaatctacaaacagaagcgtactgtagcatgcatgttgaccgcccgcgccggcggcgttgcggcgtgcctgtttcatgacgcgactcgtggcgagaatgaaacgcgtagacacgcatgtgaccggccgttcgatctctcggatgttaggctacgaactccgcggcgcgcgcgcacgattcgcacgggaagatcgatcacatgttgattcgaacacggtggatcgacctctctcgcgcgcgcagaccggcagacgggagcgcgtgtcggggagttgccgaccaacgagaggcaactcggtcaatctcgctttgctagctttgcgccaaacacatctctctgcatgcctacctctagctcaaagcaaaagcaagagctatgtaagccgagcttatacgtacgccggtgcgtgcagttgccggcggcgcgcggccgggtcgctgacgccgcgcgcacacgccatgcacgcacaccaggccccgggtcccagtgtcacctacgtaacaggttgacatgcgcattacgatttacgacccgcggcacagggcaccggcgcgcgcgttggtcacctcggcgcgcgacaaaccggtcgttttctttagctccgcaccctgcaattttttccttccgaagcgatgaccgtggaattggaacccgcgtatcggcgtatgtagtagggagaagcgcacggcacagcgtcttctgtcgagtcacgcacgtaactcgagctgagcatgagcatggaatttttacataggcaaataaaggtaagcttctcttgtgcccatgcagatttcactacagttttgctagtggccgtgatcgatgtgtgtgggtgtatctgtacacggcccatgcacgcgaaggccgcgtgaattttcccttctgaagaccgtagaatcggagttcagcccgtgccgagtttttttcagtttagctcaccgacgagtcacgcacgtaatagcggagccaacacggagttcccacgaagcaggggggctatatatatgcatgcaaatcgaccaactcgacatcgtcttgtgcagttagtttaaaaaaaaaagacatcatcttgtgcatgcacagagctcgcacagatcagacactgaactcgcgcttgtgagttgtgagtcgtgacttgcccgggacagtgagctgcaagagagcagacacactgcacgtacaggagaggagagaagctctgagcgagagaaacaccagcgcgcgcgcaagtccgatcgagctcatagtatggccatgatgaagaggtttgttttgccgctgatgatggcggtgcttatgctgttggtcgtgtcgggatcggcgcggccgctgggcggcgacaaatgggttggagcggccacctccggcgatcatcctctcatacagttcctcaaacagctgtacctgcagcagctaccatcaaggccctcgtgcacgagcaatgacccaaatattccaccgccaccaggttgcccttcccacccccactaacatgttaggcaccaaattggcaaactctatagtctggtttatggtatttctcgccgtgtacttcctagaagggtagagatgaatgcaatatagtttacttcttgttcaattgcaattagtcacaaatgtatgaattaataaagtgccagtctttgtttgtaaacttttgttctcacaatcctgcaagtactgtatgtggtatcgtccattcgatgatggacgaatgatacgtaaaacggaattggtcggtgcaatcgtgcaagatacattgccacaagaaaacgtcaatggtatcggttgaaaaaccctcataggtgccggattttctagccggcacccctcaggtgatacgaacaaaccggcacctttgaggctctagtaataaaaaaaaactgctcacatcggttcaaatcgagtcgatgcttcgatccaagaacacatacaaaaactgaataaaaattttaacaaaaaccatcactgccgttgctcattggagaccgaggcattgatagatccgacgatctccaagtcgtaactcgtaagtggtgttggtgcaccgccatcgttgttggacgggtgtttggtatacttcaaagttgtcatcggcctagaggtagtatcggtttcagagtcctagaatagaccgatgctaactattattcaccaacagttagattcttgatggattcggttaaggaaattaatcaattaaaaaaagtttatccagaagaggtcgagttcaagaatgatgcgatatgacaatttatctattaattagatagagtcagttggtttcctttttagttttaggaaagtgtgtttattatccgatcaagacttgtattttttcttttatcattataaagtttgagtcgtgtccaattaggactcttatcgacctatgggtataaatatgtacacccggtgtccctataatctatctccacatatcaatatattaaatttcggcacatcgccaccatcccatgagattttatcttgatgagttctagttttggctcatgggctgcatcgattgagtttgacctctggcaagaagtgagtttagtcatcttcgcttatgctggtgtggctaggacttcctcagttgagtatgatattccaatcgagctgatgcaagtgttgcctatcaggtatatcatatctatttttagttccattattgtttatagttatattgacttagttaggacttcctcggtcaggtccgatattctgatcaagttgatgtttctttaaacataatgttactctagatcgatttgttatatatatccatcacattagacagatttatcaactcattgggatcagatattaaacacaatcttgaactctcagttaggttcgatcttctagattaatattgataatcaaagtcatgttaagttgataggttcgtcggagggttagccgaccttatccaatgtgttaaatttctctttgatggttttcctggcttggttaaattcaatacataaccattttgatcactgtcatattagcttgtttaaatctatcaggcaattatcaaccttatgctgcatcggttggtttcgacctatgggggttgtggttgtaaattagatttatttaagtaagtaggcatcaataattatatcatcgggggtttcaaccaatgcgttatctggatatatattgtttaagtgttgtatcggcttataaggattatatacaagttggttttaaccgaatgtagcaaacacttcattgtttatccaactatttaagtctatttgtatcagacttccaatcgatccaattctccagcagccaattgttcaacctatcggctaattactgctacattgacatcttgttagttgtagaattaaactaacttgcatgcctgcacctcatcaagatctatgacctgcactgaacctaagtagatcttccaggccttcatgtttttcgcgtcaacaacgggccaaggggagtaggtcactgtttccgttggatggagaggcgcggatcgaagaggctgccatcgttgttggaggggagagaggggcgccgctcaattaatttggggagaggacgaattgagaaaacacaagagagaggagaggaggaggaggagaaaaggccgagaactaaaagaccacatgctcatgtgttcggctccgctagctcatcccaaagttcctttctaaaaaaaattgaaaaaggagcacttttatccctataaatgtgccggtttaaatatgagggctactatataacggaatcccgttttcgaacgggatgacaccagttaggtatcaggtccggtatcgggtgatacctatcaggtatcaagtgattctaccacgtttcaggtgataggtggtacctgcgaagtatcaggtgtgatacatatcaggtatcatgcgattcttgccacatagaagatgacacttacgaggtatcaggtgatacctatcaggtatcacgcgatacctactaggtgatacttgcaatgtatcaggtgataaaggtatcgtgcgatacctgccaagtatcacactatacataccccgacatcgatgccgacgaccactgccgccccagcgacccttcctccctagcttcggccaacgccggtccgctgccactccctcctctggctccggcaccgcaccaccgccaccccctcccttacagcaacgcattcagaacacgtaatggacttatttctgcattacatccttcttcctgttcaggcagcgagatcacggcaaattggccaaattaaaatgtttccttgactgaggaatctttgctaggtttctgttacgcgtgccaggggaaaacgcggtagcgcgaatttcagatttccccagtacgtaccagcagcctaacattagacattgcaatattgcatctgatgtgttgaaaattcaggagcttagacttggttcctagttcttcattttcagtctaaatttcccactgacggcgtcaatcccttaaattaattccccgcaaaaaaaaatcccttaaattaattccaaatactaacgccgattcaagtggccatcgtaccgagcaagcaaccgccgcctgccactctatagtcttgctccaattcagtgatgaacatatcagaattttgagaagaacatagtaaagttcagtaaagtttcttagcttttttcttagtgaaagtgagtagaaaagacagaaggagatcagggagaagaacggcgaaagggaagtaaaagatcatggccgtgttgatcaggaagcttgttctgtcactgatcgtgatggtgatggtgttcttggtcgtgtctggcacggcggcggcgcggccattggcgggacaggaatgggccggagaagacaccgccggcgacgactccgtcgtcgtcaggtttctccggcagctgtatctgcacaagcttgctggtccaggtcactcctgcaagacctacagccctaacggcggatgctgataggatcgatggtgaagatggcttggaagctagctagctaatttgtgacacagacatatatacagcaattctttttttttctttttgctaatatatacaacagttcaatttgtagatttattcggttgtaaactagagatattatttttccccggtgattttttccggctaagtagattatatcgtgttgttgtttcgatagggattgaaattttcttgttgaaacgatctttgtggtgtagaaatttcagtggataaccctgcagctgtgtatagaaaagcttatataaaatagaaaaagacagtgattaataccgttttgtttgcatacaccttgcctacttctgtacttcatatatactccctctgtattttaatgtatgacgccgttgacttttcgaacaacgtttgaccattcattttattaaaaaaattttatgtaaatataaaaatatttatgtcatgcttaaagaacatttgatgataaatcaagtcacattaaaataaatgataattacataaatttttgaataagacgaatggtcaatcgttagacaaaaagtcaacggcgtcatacattaaaatatggaggtagtatcattttgatatttttcacttctattgatgggatcgaacagaaattctcttcagttttgctagtttccaccgagggtcaaatatataataaaatccgcaggggcacttcttcgctactggcccggcgaaaaaagataaattcatttgactctgttcctgtttgtgtttggcttggttttcaagctgggtaatgaaaattgcctgattaaaaaaaagataaattcagtcctaggtaaatactattcggcttcctcgtgctggcagctagcacatctgaccgacgctatgagcattttgatttgtactaaaaaaaggaaattacaaaatttaagaccatgagatgctgccgtaaagtcgtactccctccgtcccaaaaaaaaaaaaaagacaaacgctggtttccgtgtccaacgtttgaccatccgtcttatttgaaaaaattatgaaaaaaattaaaaatataagtcacgcataaagtattaatcatgttttatcatctaacaataatgaaaatactaattataaaaaaatttcatataaaacggacagtcaaacattgacacgtaaatctatgatttgattttttttagacggatggagtagagcgcaatgcctgaccagaaacggagcagagctgcaagtcaaatgaaaccgaaaagcaccctcgtgccaacacccaggatctctgtcttttccttctttctgtccccctccccactttgcccaagtacactggtctctatctgaacctatcgatcgtcgataaaagacgacctgatgaagaaatagcacattgtttactgatcaaggaggagagatccaaattaaggccgaagagcatgaacctgcgcagcttgctttctccgttaatttctcaacctgcaacgcaaacaacgtaggagtactgtagaatgcatgttgaccgcccgcggccggcgtcgttgcgtgctgtttcgtgacaagactcgtggtgaaggtgaacgaaacgcgcaggggcacgcatgacccggccgttctgttcgatctctcgggtgttagcctacttgagtccgcgtctccgcggcgcacgcacgattcgcacgggagatcgatcagatggtggggttgattcggactcggtggatcgacctctctctctctcgcgcgcagacgggaaagcgtgtcggcgagttcccgaccaaccaaggagaggctagctagctttgcgccaaacatccgctgtgctgctgtgcacatgcctacctcaaagcgaaagcaagtgggaagagagcaaagctagcttacgtacgtacgccggtgcgtgcagtggccggcgcgcggctgctggcgcgcgggtcgctgacgccgcgcgcacacgccatgcacgcaccacgtacggccacaggttgacatgcgcattacgatttacgacccacggcacagggcaccggcaccggtttggttaattggtcacgtcggcgcgcgacaaaccagtcgttttctctttcctttcggagcgacgaccgtggaataatgggaaacccgccgcgtagtagtacgtagtgagaagcacacggctaattcaatgcacaccgtcttctgtcgagtcacgcacgtaacttgagctgagcatgagcatggaatttttcacatactacatacacaagctttgctagctagctagcagtagccgtgatcgatgtgttggtgtggtgtatctgttacacggcccatgcacggtgaaggccgcgtgagttttcccttgtgaaagaccgtagaatcggagtccggcccgtgccgggttttttcagtttaacccacaccaaacgagtcacgcacgtaatagcggagccaacacggagttcccacgaagcaggggaggctatataatatgcatgcagatcgaccacactcgacacctcgtcttgtgcagagagctcgcaggtagctattagctaacgagttagctctgaactcgcctttggcttaactaagcagtgagctgcaaggaagtagatacttgtgcaagctctgagcgagagaaacaccagtgtgcaatcgtagaacttgtgttagacacacacacagagagaggaagagctcatataatggccttggtgaagaggtttgttttgccactaatgatggcggtgcttctggtgttggtcgtgtcaggatcggcgcggcagttgggcggcgacaaacgggttggagtggccacctccggcgatcatctgtcatacagttcctcaaacatctgtacctgcagcagctagcaggtccaggtcactcgtgccaaaccaatgacccaaataacccatcatgtactgcctcggccaaccaccactaaaaaacagggtagacgccaaattaaatatcccaccatgtatatatattgccatcacttgcatgctaacaccaaattctaaagtttggttgtgatatttctctataggagacaatgtagtgtatatatataagatctttcaagaaaagacaatgtactgtatatgatctttgaaaaaaaatgcaatttagtctttttggattgctctgtttcttgttagattgtgataaactgcaagtatatgaattaataaaatggcagttttttgtttgtaacttctgttcttcgtactaccttgcccaagtgttaatgtaaatgttgtccaattaattcgatgaatccatccagtgttatgtgagatatataatggatttgatatatatgggtgaaactggaagctagtctgaatatatatcccacgcagtagaccagtagagatataacagaaatgctatctgagtatctgacgggatcccgtcccaatcgtgatagacatgatagggcagcaaccaactaatccaccgattctatctccttctaccttatccattctaccacatctctctcaaagcatgcatattgctgcacaagctccggtgtggcatggggtgtggatggtggaggacgcggtcaccggtgacgagttcccggcgtggcatggctatggacgacggaggatgcagcctccgggacaagctccggcgtggtgcagagcatggatagcgaaggacgtggtgtggggcgtggcggcggaggccgcgaccgccagcaacaagtctagtgtggggcgtggcagtgaaggacgaggctgccggtgacgacctccgacatagggcgtgaacgacggagaacgcggccgccggcgacgacctccgacgtgaggcgtggacgacagagaacatggccaccggcgacgaccttcgacatggggtgtagagggtggggccaccgacgacgacgcctcgatgctcagctcttgatacctagtaggaatcacctgatatctggtaggtatcatctaatacctcacaagtatcacccgatgcgtggtagaaatcatctgatacctgataggtaccacatgataccttatgagtatcaccagatacgtagtatgaatcgtctaatacttgataggtatcacttgataccggttatgtttcaggacatgatacctcagaggtatcgggacctgatacctaatcggtatcatcccgttcgaaaacgggattccgttgtatagcagccctcgagatataatgtttagacggtaagaataaataccacatactcttttttaaaaaataaaataccacatatggaacatcaaaggatcctcgctaggagcaagatcgagcattatggctcctctaatgaagtctctatctcttctctttttgtctctattttgcgatgtctctatctcttaatgtgtatcaaatggaatgactttgacttgaacagaaaactttgactgagctagctacgcacaaaagtttcatcaacttgctgacctcataagtggggcagaagctacaacttcttcattttttttcttttcaaggaagctacatgtggccgatcgcacggctctggttggttgagttacagctcacaagccatacaaaataaacaaaaaaaatcagaaatgatttatggatataatttttatgtatgcattatttgtgatttaaaacccaattctagaaaatataccaagatgagaaaaaaaatataatcaactttaaaattagagcaattttatattacttgagaagatactctaaggttccactttttctattatatatttggcacctcttggtacctaggtaccactaaatttttggtacctcatgatacctccttaagaaccgtaaaattactcttaaaattaagtttcaaaaatttaaattttggtagcggtaaaaaaattcagcaattagattattacattatgttaaccaaaaaattgaatttataaaacacaaatatacactctcggtactttctccttttgttgagttcatttttccctgaatacgaagaatgttacatcaaccttcatcactgtacgtggcgtgttcataaggcaatcgatcttaaacactagttagctttgcaaatctttggctgtgtacatcgatccgtgtgaataaccggatttttaatccattatctaaagaaaaaaaaaagctagtcttgaaatattgccattcctttcaacaagttcacttggaacattgcatcaagaacgtattccggacactttcagttcgtcttccatgcatgctggtctatccggacagtcatactggttacggcgaaaagagagatcagtggcagaaagctacatctcaagaagagagttattgcagtcttggtttgcaagctcgtaacgaatgcaccgaccgagaccgacctcactccgtataactttgcaaagtcgttgcatgtaaccaagaaaaccgtgtacctgcttttgcaatttcattcacaaacccgtcaaattagttgatcagtcagacaatcacacatgcacgtaaaaaaccatgaactttcagggtttggtcttggcattatgccatgttacgacttacgagcttctcccagcttataactaactgatcgtaatatcgagcatttcatcatcgtgtcacagctcaaaacactgcagagttctcttttttttttctaaaaaagcagcgccacgtacgccaacgatgaggaaggttgcagtggccatgttcttcgtggtgatggccatgtcggcctcatggtcgccggccacggcgaggccgtatgccgagcaaccctccgccggtggctccgccaacaccgcgttgccgccaccgacgcattggagaggttacaagctactgccgttggagcaaaagcaatggcgcccaccgtgccattataccaacgatcctaataagtaatacccactgttgaattgttgatagacagatcgttaccttaatcagttctagcattgaccgtgtcagggtctatttgtgtcagtacccataattaattttatttttcggtgttcattcataacgtaagtagttctttaatatattttagtagtagattatgtactcgtgattttcgtggccaattacgatgaataaagtgcgtatactgtaactgtttaatactggccttttgtttttttaatatatggcatggggatatgtaccaatgtacctatgaccattcctatcatttaaaaattttatttaaatatgtaaaaatataggtcatgcttaagtaccctagcattaaaataagtcacaacaatataaataatacttctaattacatttttcaaaaaaaaattaaatatatgttaaaaagtcaacgtaaccatcttatgtatggcctgatacttgtgggtacctgggtaccaggcctgatacttgtgggtacctgggtaccaggcgggtaccaggcttgatactgaggtatcgcgattaatacctaatagagaaggccgtggcacggacgcataagatggtgaggtccggccggaagtcggcgacgaccatctccaggaacatgcgcttcagcaacttcatcttgaagttgatggcgaaagagaggaggtagaggttctagagcaggttgtcgccggcgttgcggtgacagaggcatcgagaccaccggcttcttcttcttctgcggtggcggaggaggagccatttgcactcaccggcaaggacgcggcgggagcagcgggcaaggacgatggcgctagtggatcgtgagggcgatggagaccttggcgaggagtgcgagggaggagaggagaggcctcggcgccggcagcaacggggagcgccagtagaagaagcggcgccgcagcgggcggaggacggcgtcgaggaggcgcgacgagatcaccctcgatgccgccccgacctcaccgacgccgtgccatcgtcgtccacctcggccgccggagacgacgacgacgaccccttcctcctagctggcttcatctccatgctcttggacttctcctgactcctgagtgagctagagagagagattgtggagaggaagggatcgaaggagataaggttgatgagaccttatcccgttgtgacgggatactgttgtgtagattttctctaatttgaaagcatattcctccaatcgaaaaagttgtcccctctcttataagtgcagtgagaagcacacggtacaccgtctactatcgagtcacgcacgtactccttccatccataaaaaaactcaattctgggtttgaatcttccagatttaaatatatgattggattttttatgagatggagggaatagagctgagcacaagcatggaatttttacgtagacaaagctagctagcttctcttgtactcatgcaaatttcactacagatttactacctccgtattttaatgtatgacgtcattgactttttaaccaatgtttgaccattcgtcttatttaaaaaatttatgtaattatcatttattttattgtgacttgatttatcatcaaatattctttaagcataacacaaatatttttataatttcacaaaaattttaaataaaacaaatggtcaaatgttgttaaaaagttaacggcgtcacacattaaaatacggagggagtaatttgctagtggccgtgatcgatgtgtgttggtgtatatgttacacacggctcatgcacggctaaggccgcgtgaatttttcccttgtagagaccgtagaatcggagtccgggcgtgcccagttttttcagttttactcagcaaacgagtcacgcacgtaatagcggagccaacacggggttcccacgaagcagtaggctatatatatgcatgcaaatcaaccacactcgacatcgtcttgtgcagagagctcgcagcggtagctagctagctaacgagttaactgaactcgcttgtgacttgcctgagacagtgagctgcaagagacgcgtacaggagaggacaaactagctagctgcgagcgagagaagagtgtgcaagttgaaggtggtgtttacatcagcgacttaactttagtctctgtctttagacactaatttagagtattaaatatagactacttacaaaactaattacataaataaaagctaattcacgagacaaattttttaagcctaattaatctataattagagaatgtttactgtagcatcacataggctaatcatggattaattaggctcattagattcgtctcgcaaattagtccaagattatggatgggttttattaatagtctacgtttaatatttataattaattttcaaacatccgatgtgatagggacttaaaagttttagtcccatctaaacagggcctaaagcttgtgttagacacagatcgagagagtaggaagagctcgtattatggccgtggcgaagaggtttgttttgccactgatgatggtggtgcttctgctgtcggccgtgtcaggatcagcgcggccgatgggaggcgacaaatgggttggcatggccacctccggcgatcatcctctcatacagttcctccaaaatctgtatctgcaacagctttcacaaccaggtccctcgtgccgcagcaatgaccaaaataataaaccgccgccagattgccacaactaacatggtagataccaaattgtatggtctggttgtcgtaagtggcgaagccagtaattttaccccgtgaaaacaatttttattgtttggtattgtagtggggttatttgtgcaaaacttaatagatttaaatgaaaaaaaaatcaagacacacaaagggtgatagtacaaaaattgtggggtcagccaaacccatagtttgtgcgtggctcctccactagttttctttgtccttacttaatataatattattttatttcgtgttgaatcagaaatgtatggattatttgctctcacaaaccttgcaagtactgtatgtacgtatgtatcgtccaattccatggacctgtactgtatatgtatataaagggaattgatggactaggtaccgatggaaaagcagccatgcatgtccacagaaatgtctacataaattgcatcgatggtcagaaatatctcacctatggaacacccgagagtcaagcagattgcatcattactctgttcttcccgtctctattttgcgagctgaggcgtctatctctgagaatgtgtatcaaacgaactggccggttgacttcgacttgaacaaaaaactttgactgagctagcttgttacaccaaacaaaggtttcatcaacttgctgacctcataagtggggtacaagaacaggcgtcgggatgcaagcaagacgaataagacgaataaagtgaatcgtacttctaatttattttttcttctaaaaactatactaccataaaagaaataaataactaagtgggttttatgcggaggcttgcttgtttgcatgcctaaaacatgagtggaatatcatacatgcctattgtacagctggggaatctactccctactttccaatataacttaatatttagctttagatagtagagaaaaaaaaacaaaatacctctcattaataggaaagcagtattgatggtgaatatttaggggtagctaaagggtattcaaagcagaccggagttcagatcttaaacaagaattggattttgatttcatcttctcgccaaactcttccattcctgatgaaaccatctaatatccattatgcgtagctagtctagtactactagcctatttacactagcttactcagcatcatacgatttaagagtcttattggttgcccatatcctctaataagccaaaatagtttattagaaaataaaaattaatttatagataaaacttttatatatttgttcgtagcgatctaaaagtcaatactaaaaagaaattaagttgaaaatatcttaaaataaactttaaaatcaagttcgaaaattctaattttgacttttactttggcttattaggctgaccgatggggctataaatttccccttgcacaaaacaagtgctaatctgtagccaatcagccacgtagatttccacgaaggttgtaagataactcaaccagataattgctagtgtgagtattcccccatcctaaaatgtaactgaagatgaagatgaagatgaagatagagatgaagataaagtttttttatgcaaaacaaggcggtattaattgagttttaattattataaacttgaaaatagattaatatgatattttagagcaactttcatatagaaagttttcatacgaaacacaccgtttagcagtttgaaaaatgtgccacgaaactaacgagacctaattctgactaaaaaatggataaaactagcatgcgtatgtgcgacaagttcactgaccactgcatattactcatgtcgcccccaaaaatggatcaattgtgccacaatcgatcaacatcatagcttcacaagatcagacataaacacatagtaaaaatgaaacgtagtaaatttacttctactgccagtgccacctctattaaaagtcgtcagtttttacagtattcactcggccattggcaaatcgacaaggaccatttttcacctcagaaatgataatgtaaagtggaagtctttggtggtaacttttattctcaatgtacaagtactagcttgcttaacagcttacaatataccaactgggcaagcactcatctgcgaagtagccatatttcaagatattttttagttagaggtagttatgtatattttgatatggagggagtccatatttaattcacaatatcatacagaataaaaatttgcaaagaatttaacacacaattgtcgacgtttgatgtctcgactacggtatttggacagtatgcggatcgttggtgctaggatatacgtgagactgagataaaagagatggagacgaggatttttatacaggttcgggcccctgagctgtcaggtaatagccctacatcctgttggccggagccgatgttgctttttattcaccataatcacaccagtacaatatatggggtagcctatctaactgttgtcgacatggcggtctgaaggtctaactcgtagtcgacaacagggtagccttcctcctcgagctcgcgcctgacggaatcagagacagtgctagatccctacaaccggcctctgaaggtaccggatagggttgatccaggcgtatctctgatgtcgatatctggcggcttgtcttggcgtatgtaggcttgtatgttgtggcttctggtgggtgttgatcttctcatcgtgggtggttgttctctcctctcctcctaggggccctgtatttatacccataggtgtccccttgtccaagtagaactagggaaaccaatatggatacaatccgagtagtccttgtcgtttccatgtagaactctggttgtctttccttattggaactccctccatatctgaagtcagtttccgtataagacatggtatgtggtggatcctgccgagatttagtcaactactattaggtatgtggtatccataaccatgacagtagccccccgacttcaatgcaaatgaacgaattcatattctcaaccgcacgcagaccttggagtaactgttatcgagctcatgtgaccgttctcggtgagtttagagataacgttagacttcctttgtcagcctcatgcgggcacctaaagggtttgtctgagtcaatctccgatgtcaaccaaggaagtacatagcgtacgactaagtcttccgtcttgccgtaatcgagaatttgtattgaagtcaagaaattctatctcggagggtacactatcttttcattccgtattccttgtcgagatccagcaaccattctcgagtgatcgagaaggcatagagtctgcgacggagctttgtcaacatttgtcgtactcgcctttagtcgatcttggtgtagaaccatagagacatggagtcttcgtaaatgtcgaatagaattttcctaaaatcaatactcagaaaagtatatcaaatagaaagagcccccgagcgaatgctcaaagggtgacatgttataatatgtatggtaaattgaaaatgaattaaatttaccgaccaatgttttgtgtatgagcgtcttaccgacttcgatcagttagtttgtagagtcatacactctccctagcccccagccttgtcgtcggagaatcgttctcagaggataaggctcttggacccttaatctgccttggttgaataagcactgatcctagccccagccgtgaagttggaaagttaatttccgattacacggcttggttaatacgcatggcaagaactcttacacgaccagatcttacatggtatttcgtctctacaggatccgacaaggccttatcggctctgggcgtccccagccgaagatcccttaggttcctcggaggccttgtcaggacggcgtaaagggacagtaggataggtttcaacgctaggtgtcatcgtggtaagggatctctaggtaaaacacttggcgatattgtgtacctgctaccaactttgttgaagtagaggtagtgggagaaatcgctacaccgctggtcgaggaccaggcagtagtcgtaactcgaccactagaagtggaaatagtgggagaaacgctacatcgctggtcgaggaccagggagtagtcgtaactcgaccacttgaagtgaaaatagtgggagaaacgctacactgctggtcaagaaccagggagtagtcgtaactcgaccacttgaagtggaaatagggggagaaatgctacactgctggtcgagaaccaggcagtagtcgtaactcgaccacttaaagtggaagtagccggagagacgctacatcgctggtcgagaatcaggcggtagtcgtaactcgaccacttaaagtggaagtagccggagagacgctacattgctggtcgagaactaggcagtagtcgtaactcgaccactgaaagtggaagtagctggagaaacgctacatcgctggtcgaggaccaggcagtagtcgtaactcgaccactgaaagtggaagtggtgggagagacgctacatcgctggtcgaggaccaggcagtagtcgtaactcgaccacttgaagcaaatgtacgagagatcactacgatcaactgattgagaaccggtgaatagtgtccctcgatcatttgtagtcgtggtacgaggaccgctacgctgccgtagacgtaccttgaccatctgaagttaaggtgcgagagattgctgcgtactggtgcgagaaccagtgagcgagcggaattatctctcgaacaccaatagaagttgcggtgtgagagattgctgcgtactggtgcgagaactagtgagcaagcggaattatctctcgaacaccaacggaagttgcggtgtgagagattgctgcgtactggtggtttattgcaagtgtatttcatgtggccagcatgactcacgtacccaacttatagcatatccggatgtccgttcgcaatcatgtcgggtgatcaagccgacggcgttcgcgaggaattatccgttaacaaccttttctcgagtagtccagccatggccggtgctatgagataggtcgtcggtctttgttggtaggttgggtgcgataactccgcatttgtcgagaatgttctcgataatggagtgtactcgaccataacctactcaagtgctcaattattcctgaaaaatattttctagaaggcaagatatatagcagataatatcgagtatgtactcaaaaaactgcatggatcttctagtattatcaggatataacgagcagattaaatatcaggcattatgtaaaccgtaaacaagcatgatttatacagaagaaaatagagcgagcccccagcgttagaccgtagttggcctatcgtcggaagtactcgcacaacggacattgtataaaaaacatgctctaggtaaacataataaattattgatctgacaatactgcatgatctggataggtacgataaattgcatataaaatattgcgtacctgtgtagatatatgccggatatatctacggaattagtagattgattaaattaattaatctactaattaccttaactagccttagtagccattgaattgtcttcggtgcatgtatatgatggcaaaccaatgcatgcctgggcacgtattgagtctgtgcatatgcatgtgcacatgtcagaagcgatcagtacgtggcgatgtcgggcaatggtatatccggcttgttactccgagtctaaccaaaaccgcacttaaacccgatgagtgtagtagtcggtttcggtctctagaggtgtcggcgtcttgtacccttccggcatcatcctcaagatcgtcaatggtcggaaataccgtacagatgccctccgcagcggtggcgtcatctttgaaggttggattatctcaacagatcaaaattgttgacgttgatggttccgatctggtcggaagatgtacttcagtcgggttagatctccttacagccgaagtcatcgagtagcttgttgttggagaatccatcctttgaacccatctcgtcaaaatatagagcaccaaaacccccctacctggcgcgccactgtcgacgtttgatgtctcgactacggtatttggacagtatggggatcgttggtgctaggatatacgcgagactgagataaaagagatggagacgaggatttttatacaggttcgagcccctgagctgtcaggtaatagccctacatcctgttggctggagccgatgttgctttttattcaccataatcacaccagtacaatatgtggggtagcctatctaactgctgtcgacatggcggtctgaaggtctgactcgtagtcgacaacagggtagccttcctcctcgagctcgcgcccgacggaatcagagacagtgctagatccctacggccggcctctgaaggtaccggatagggtcgatccaagcgtatctctgatgtcgatatccggcggcttgtcttggcgtatgtaggcttgtatgttgtggcttctggtgggtgttgatcttctcatcgtggatggttgttctctcctctcctcctagggggccctgtatttatacccataggtgtccccttgtccaagtagaactagggaaaccaatatggatacaatccgagtagttcttgtcgtttccatgtagaactctggttgtctttccttatcggaactctctccatatccgaagtcagtttccgtataagacattgtatgtggtggatcctgccgagatttagtcaactactattaggtatgtggtatcataaccatgacaacaattatattttgatgtcttgtaaaactctagatttagtaccaattttattaaaggattacatattagtatttcataagggtgtctagaaaatctgaaattctgtccactaaccatactaatgtttggccatcattatgtattaaggttgtgttcgaaggtatgaccaaacccacacctcccaacgcgcaaaacaagaggacagattagtgcataattaattatgtattagttaaaaaacttaaaaatagattaacatgtttttttaaaagtaacattcctgtagatttttttaaaaaaaaacatatcgtttagctgttcggaaagcgtactgtgcgtgcgaaaaatgaaggagaggaagtttggaacttagaaaaagaaaacaacctaagtggttatcaacctatcagaattgttgtgtttaataacaagaaatttagtccactaacctgtgatgactacttgattaactattgtaatgtaccctgatcaagattggttattgaactaattaacatcttaaataaatatgtagttttactatatgttattatgaacgatacgattgcttatgttgttatatgataaaagccgaataaccgtgctttgttacggattaaaacaaattattagtgaggttttttgaataattttgtacctataaatgtcatattgtacaggtgaatatgatagaatcatacatgcagagagatcattttataacattaaagcacatgcatggggaattgatagaaaacatgatggccggagtagatgataaattaaagaaatactatatacttggtgaccaccattgttctcttttaaaaggagtatagaaattgtgctaattaagcgaatttacaatattatggtttagtatatagtttaatttcacgatacatatatagttttgtagaggtgtatacagttttgtgaaatagtggtatcttttggtacatctaagaactggtaaaactgctcgaaacactagcatttcgagctcttaatctcttatcatatcgaactgcattttgggatgcatgaaaaatcactgctctagttaagaacacgaaattgccggttaagtagaactagtagtgcttcaagctctgttatagggagtttcttctttttgaatatgaagaacactacatgaactctaatacagctgatggcgtgttcacaaggcaatcgctcttaattaagcactagcctcgcaatcttgccattcctttcagcaattcacgtcgaagttggaacgatgtgcccagtacgaattccggacactttcagttcgtcttccattcatgctagctggcctggtctatccggacagtcagactacttacggcaaaaagagagatcagtggcagaaagctacatctgaagaagagagttattacagtcttggttttgcaagttcgtaagaaagcatgcactgaccgatcgaccgacagacctcactcgatataactttgcaaagttgcatgcttgtagaccaagaaaacctcgtagctgctttgcaatttcattcacaaactcgtcaaattaattagttgatcagtcagacagacagtcacacacgtaaaaagccaagaactttcagggtttggccttggcatcaggccatgtctcatgactcacgagcttctcccaacctataaataaccgatcgtaacatcgaccattcttcgtgtcacagctcaaaacactgcagagttaattataatttttgtggagaaaacagagcagatcagataacacaactgtgagcgagtatcttcgatctagctagtacaggagttacagtatacataatcgccatgccaacgatgaggaaggttgcagtggccatgttcttcgtgccgatggtcatgtcggcctcatggtcgccggccatggcgaggccgtacgccgatcaagcctccggcgccggtggctcgggcaacatagcgctgccgccgccgccgtcgccgcactggacaggaggccacaggctaccaccgttggagcaaaagtatagccgatcgtgccctataagcaacgatcctaacaaccactgttgatagacagatatggcgtgagatcgtataccttcatgacttcatcagttctagcattgccgtgtcaaaggtctatttgtgtcagtaatcagtacccgtaattaagcaattttacttttgaaaaattccttgtcaatattcattcataacataagtagttctttaattataatatactccctctatcacggtttgttcatcacatatggtttttaaagtattcccaaaatggtcatcctccaacaagtgtacttgtggttcgtgtccaattgagaagaataaactgtatatattgtaactgcttaatgttcccatgtgtttttctaatatatgacacaattaacttctaaatatactatggagattatgagtaccatatgcgcacacaacttctttatccgaccagatataggggatagattatgtttatggaatatgtaacgagccatgacttagatattgcgttttcttatgtattatggaacaacctaaagttttgattcggtaatattgtaaagtagattaaggaaactgatgtcgtatccggccaggttctctctttgtaatcatgtcccccaagtccccaacctatataaggtgggcaaaagccctccaagggcataactccacagctagatcgtcagatcgatacacacccaacgaatacaatccccaaacagaagtacggtattatctctcatcgagagggcataaacctgtctaaattattgtctatgcatccatccacttttaggtctcgtgcgctaccccttttattattgccggtttcaagattggacatatacatttggccgttcatattatttcaaataaaaaaataaatttgtagaaatatagattatgctcttaacaataaaacaattcacattaaaataaataataattacatatatttttaaaataagatgaataattaattaacatatgttaaaatgccaatggcatcctatattaaaaaacagtgcgattactgcttagtgcttactcctacacgagctatttaactttgttgggctaaatttctacaacggccgtattgtgaactacatatagcacggccttgaaaaggcccaaacacccaagcgataaaggcctccaatgaggcagtaggactaagcgttgaccctaaaatggaaagtacaactgtacaagtctttgttcacagttgcatgcgtaatacaacgggaaaagtccatgaagaccgctggttgcatgtgcagtggttcacccactcaaagcagaggatccacataacactagagttcttttaaaataaaatacactacagctcaggtcttaatcaagaatatatcaacatagtaatagaagaaaaaaaatgaccatacgatcataattagctctaaattataatataggccgaccgatattgttgtatgtaaagtaaaactgtatgtatatgatttatacgttacaactttatgcacattaagtaagagttgtacgtaaagtcgaactatattttcagttttacatgaaaaatgcaattgtatttatagaaatagaatataaggtttgtatatcaaatctaattatattttcatttgccctgcgtaaaattacacaaggaaattcgctagttggattttggttccttcttcttacccaaatcgtctaacaacgaggcataagcagcagtaaaatgtaataattgcgtaaaaacacataagcctcgtttttttctgcaaaaggattatgaattattgtagacatttaaatggcaattttttttcaaaaacttttctcaacggtaactaaaaaaattaattatcgttttaacttaaatatttgattgatgagatttgccctggtccagaaaaattatctcgaggtactggtacctcggtaccaaatccttttcatcgttggttctagctggcaaggatgaacacaatgttaaattcaacgatcagaaacaatttggacacgtgttggatcggagttggatcggagcaaatctattcatttgtgttctcggaataaccgtcgcaaattcgttcatccattagctataatcatgccgaaattccatttttcttggagccaatcagccacgtagatttccatgaaggctgcaacgtaattcaaccagacagtggctagctagtgtgaggtaaagcatgcactgaccactgatgtactcatgtagagctgggacttgggccgtgccgggctagcacggcccggtctgtcgtgcttcgtgctagaacgggccgtgccggcccagcacggtctgctaatcgtgccgggccgtgacaggccgaggtggagaagagagagcccaagcacggcccaaatacatgtcgggcctgttcgggccgtgacggcccaagcacgcccagaattacctgtgcaagagctgtaattactcgggccacgcacgcacgtacactgaactactgaagtctgaacggctgaagtctgagtatcagtctgaccacgcacttagttctgggcatgccgcatgcggcacagcaacaggcgaggcgaccatgcacatctgcatggcactattcccttgagaaattaatcaccgcatctacatgagttaaattccattcaaaacagaagagtaagaaattaatcaccgcgtcgccactcgcacgcacgcgctcggcgctcctgcggtctcctgatctcctcgcgctcgcggcgacttcgggctctcctgcgctcctgactttcggccatttatcgtgctgggccagccttgggccttcgggcatttttcgtgctgggctgacccaggcacggcccaatggccgtgccgtgccgtgccgcccagcgtgcctcaacttacggcccaggcacggcccaactacgggccgtgccggcccggcccatagccgtgccgtgctcggcgtgctttccctcgtgctgggccatcgtgccttgggccggcccaagaaagcacggcccaagtcccagctctatactcatgtcgcctcaaataatcgatcgattgcgccaccatggatcaacatcacctaagaccatatcaccagacctagtagtaaattgataaatttacctctactgccccgcccctaaacttgaaagtccaaaaatcatcattattcaatcttcgacttttcaaacagttagtttataaacccctcaacctgaattaaacttttgtttaactacatgcatggcagttcagtttctttttaaaaaaaaataaattgaaaagcagtgaatcacacgtgccacacaatctttccccttctccacttcaatcttccctccccttctgaaaaatctctacaaaattccttcattttggtctcttttgtcacgtaagaatttacagccaaaaatcgtcaaaaatcattcgctccaaaggagatcaaacatagggcctcttatttaacgtagaagttccactagacttttgcaggaaccaattcaattttgcgaggaatcaagagcataacatctcattctgcgataggcaactggccaagttgaactatctattggccaagtagtgactgaaactgtagcgggatttacgctgggctagaagaattctgcaaatggaaagcccaaaccgacagaagcatagacccaagtgacgaagacctccgatgagaccccgatccaggcaacgttgactttgacttggaatggacagttcaaattttgatcaagaattcggttctgattttatccaaaccccctatcttgttccctgtgaatccaatccatcacccttttttttttttgtcatgtcgatccgttatgtatagttttctagcttagttgcacatcaatatcatcatgcactttaacttatctactcagcatagcatggtcttccccatcatcagaacaaatgctgctaaaatgctgtcctgccaaattccgtttccttcagccaatcagcaaaaagaaactcccaattccacagtgagttccatgaaggttataatgaattcacaaaattcaaccagacaattcatagtgccaagtaacaatgcaggcctactacaagtccaccactgatatgtcatccaaagaatcgatcaagtgtgttaccatcaatcaaaatcagcaaaatcagagctttacctcaagaccgagcaaaaaatcaagcgacgttttgaacagcgacaccgactaatggcaggaccggccatatctatggctctctctgctatgcattaccactacggcgacctgttagaacagtctttggttttcagaaaagtatgagatgtgaccaggtctctggtctctgctcgatcgatcgatcgatcggtagttccagtaaaatgtcactgtccgattacctcagtatcgttttgggtggtgttgaacgccatagaattatgctagtagctgctcgcggttggagtaagtgaagtgtccggcccttttttctaacctcacctgcttgtcctctgtgtgtgcagtgtgttgttctaattgcttctgagtttgcaatagaattttataagtcatgtcgctaggatggcgacggtagatcgatcgatgccgtgccgtgacgattcagccgtcaagatatatcggttttatgcattgtccttgttctttactactattgtgtagtaattgatcaaagaacgagaccagtcagtgctgaatggtgcgcaaatgtcacttgtatgactaggattctgcttagtctagtctagattggtacagttatcctagaataaaatgcgtgcgtgtgtcctcttaggttgaactggtaagctgcagaatgtgaaaaaaagaactgaaaattagcttgtgaaaacattgttggtcagtcgtaattagcttgtgaaaattagtaactttgacggtgaaaattaggcggttcaggtgaaagtgacgcgagcctggaatgtacttactagctagtgtggcaccacctatcagctcatgaatcacgaagacatgatgcaagtgaacaagaatgaccttcttttcggcgtctcctgatcgagtcctgaactttttgtttcttcagtgcatctcttgcagaacattgattattagattggcatgatgagttcgtgtttcttgcctaataaaagggttaaagcttagcgaaagtgagctcaggacaaaaaagttcagaagaagaccaaaaagttaaaagaggatgttagggggtgtttggaaaggagggactaaactttagtccctctccctagagacttatggttttgagagaggggttaaactttagtccctgttcccaaacaccaccttagtctatgtgaacaaattagaatgagagagccaatcagtacatggttaacgtttgagatcacagccaattaatgtaaggaagcaaagcagttgttaatatctcggttttgtcctatgactttaccattttacgatcccagtttacgattctatatagttagaatctacgattttaataaccttaacgaaatgcaacatcaattgtgcgtgtgtgtccatatcaaattgtgcatgttttcccatgctcgatcagtataatctaaagagaaagcggtgatccgatctgcatcgagggcaggaatagtgataagagggcacgaaacttttagacgggatatgctgactccaagccattgtctttgcttaagatccttctgcttttctgcagcaaatgttgccttcgagaaaaaaaaaagttttcaattgcagtgtacaactgcttcacatccacctctaccgaatactgtcattgcctggcaagctagtattggaaagtggagactagtccgttcttttctccaataaaaattagatgaagattaagattttcgtgacacgcttttcaaactgctaaacgatgtgtttcgtgcgaaaactttttatatgaaagttgctctaaaatatcatcttgatctatttttcaagtttgtaataattaaaactcaatcaatcatacgttaataccacctcgttttgcgtaaaaaaaacttaatcttcatcttcatttttatttttattttcaggagaaaagaacactctggtttctcagtttatattataagacgttttgagtttatatcagacttcttcgaattcatataaatttatagaaaaatatagaattactttacacaaaaaatatacttaaaatatatttaataatgaatttaattaaactaatttgattatagttgttacaatatttttctacaaacttgatcatgcctttttaactgtaatctgatgtaaatttgatcattactagttctctatcaatttgatcatacttaaaaataattcgacgtaagaccgaccgaaaatgtggaacggagggtgtaggcgtttactcatcgttgggtcaaaatttgtgtacgcagctttgaaactttacggccgtgcagcagactaccaaagggaaaaatggcatctttactctattctagatgaaccaggaagattcaggagtcgcatgcaagattttcatcatcttggagatggagccataattttctcagttaattctggcatgtatttgtaccactgccaaatacggtctgtactcattttcaaatgaaggatgatatctaaacctaattgtatgtgcatcttagtatccacatctttgattgtgttcttgacctagctaattaatcgatctctctgcacactcaaatgaagggtctcttcagccccttgaaatctgccgtctcgatgcactcggtgctgtctcgcgacgcgttgagaagcctgagcagctcgctggcgcgctccttggtgacgccgtcgcagccgagctggagcagcagcagaagcttctggaacgcgccgacctgcagcgcctcggccttgcacccgccgtccgccggcgagttcttgcacagccgccacagcgccgacacggcgaactccgtcgccatgtcggacacgtgcatcgtcttcttggcgagcaccggcacggccagcgcgtgcgcgtacgccctgtcgcgggccttggccgcgacgaggacggtgtcgagcaccgcgagcgccttctccgtcgtgcccttgtcggcgtcggccaggagctcgacgaggagctccaccgtgccgaggtcgacgaggcgggaggcggcgtgctcgatgtcgttcttgacgaggtagtaggcggtgaccagcgcggccttcgtggcctgcggcgagaccggcttcgcgacgaggttgacgagcgcgtcgtacatggcgttcgccttggacattgcctcgaggcactggttgtcgcacgacgaggcgatctcccggagcacaacgacggcgctgacacgcgtgacctgctcgccgtgagagaggatcgagacgagggcgtccagcgacggcggggaggcaatgcagcgcctggactcctcgtcgagcgggaagaagacgaccagcgcggccaagatctcctcgagggcgcaggcgcgcgcctccgcctgctggtcggtggacgccgcggcgagacgagagaacgcgagcgcgagcgcgcgctcggcgccggcggacgccaagcaccggcgattccgctcgctctccttcccgagcgccctagccctggccaccatcctcccgcacgccgccgcgtcccctcgccgcgccgccgcggcgacgccctcgaggatctcgcgcgcgtcggcggcggaaacgggcacccgcggcgtgggcacgcgctccaccccgagggcccggttcgcgacgcaccactcctggatcatcctccgcgtggcatggttcggcaccagctcctccggccgcagcgggcggccggtgacggggcacgtcggccgcccgcgctccagccacacctccaccccgtcccggtcgtacgtgatccccgtcggcgccgtcacggggtccctcatcatgtccagcgagatcgggcacaagaaatggtccggcacgtctgcggctggctcaggcggctgctgctgctgcctcgccgatcgccgcacggcgagagggatctccgacacggccagccgcacggcgcgggcgcgggcgcgggcgcgagtcatcggagtgaccatttcgtgcgccgatttgacgtgttgttattgttgttttttcaagtgcggcgtgcgcgcgcgggggcgagtgggatagttggggtttggtcggcgaggggtaaaatgcggggatatataggttgcggccggcaaggtggaacggggaacgtggggttggaggggtgaaggggaccgcggcggaggcggagcgtactattgtttgttcattttgttcgttgggggactggttttgaatgttgaccgttgaacgtttgaattgtacacggcgaatggtatttggctgggtttagttggcttgggctacctagctagctcagctgctctttctttactccctccatccaattaagtacagttcaacatttgaccgtatatcttatttaaaaaatttataagaaaataaaaagaccatacttaaagtattatttatgttttatcatctaataaaaataaaagtattaatcacaaaaactttgaaataagacggacattcaaacatgcacttaaaatgggacgcagggagtaatttgtttttgtttccgggtagtcgtcgttcgaaattttctttattgtttatggttcatggtgtatgtgatgtttgcttcagcatggtctaaatttgctgctcagaacaaactacaactattttgtcaaaaatattagtttactacaactttagataaatattttaacaatttgtaacaattgtgtatgatgactttatcaaaaacctaaggttcatcagttcacaagttttgagcccatatatcatacacacatacaatacttatgtcggtgtaagtcaggcttacatgtcatacacttataggaggtaaagttgtagttttgtaataaatcatttgtggcagtagttttttttaaacacccatctaaagttctagtaaagtgatagctttgacaaaataattgtagttgtatgaaatttattctttattcattcaatacatgttatctacccacccaccaataccatcttcccactaattaataaggggtacttgtgtgttttttctctactatattgttttctcttagggtgctaaaaatgcttttattttcgaacagaaagaatatatgatattgagcgatttacccaggaagatgtgcatattgatttcaaatcaagaatccatctacacatggagaaaaaaaaggcagaattctattgactcgcttttgtttggatttaatttcttaattttcaagtaaatttagtttgctattaggatttgtttgtttgacgagatccctcgggttagtttggatagatcaacatgttagtccagattttccattttcaaaagaaaatttcattttcttctctcatttcgaaaggatgcccaacaaattataaacatcagtacttttgcaaacaagtccttaaaatggtctggcaaacattagacccatagtctctaaagtgtaaattcaatagaataatcccttgttttcattcatccatttagcctactcctcttatattattattataagagattgtgaataacaactatacaataaatgttttttatgcctagaggattaccacgttaattaatcggagaaaaagatgaaaatatgcaccattggattgtggctggtccagattatgatggtatatgtagattgattggtatagtttttgtgtaaacaaacgagagttgtatataggggtaatacataaaagttccatgtaaaattcagttctattttaaactatttctatgtaaaattgtgaggtaaaaccccgctagttaaaataaattagtggatttcaacttggtctatcctcttaccagatatttactttagatcccctttagtccgtaatttcactttaaattttattttctttttttggggtgtgggagggggggggggtgtactttgacaagtagaggacgacaggaggtgaccttgacggcacacagagcctgtccttgagaagaagggtaaaagggatccaaagtgcatgaaaagtaagaaaacaggtttcaaagtgaaaaatatgtgctaaataagattcaacgtgaaactttaaaaacaataagggaccaaactaaaattcactcaaaaattaaaacaaatttcgctcagtaacaactgacaagagtaatagatactcgtaaggtagcagattgaaattattagggcaagagttcaatcctttagctcgctcaagcaatgactccacatcatcaaatcagaacttcactacttcaaattattgactctactactaccaagtaatccacttccccattttttccctcatacaatgtatactaaagctatgtttgtaagagctcgagattcttaaaattagcttgtgaaagtttagaaagccggttttgccatatttttacttaattttctgaattctataactaaatagtttcaaaacctaagtgcgaccacaatgtgccaaaaaggtagccttaaagaataaatatattcttaaggagtgccttataaattgtgcaatttagcaatagaaaaaaaattcttgtggtgcacctcaagcttatggcatttacaatatatgatacaaaagtaaactataagtaatataatatttcatttaactacctagtacattgtgcaattagtacacataaagaataacaaaagataccatatgcatatggactaccatataaaataaataatattatctatttctacttctccctcttctactaatgctaccttgtatctatatatatatatatatatattgtagggattgctatagttaaagtttatttacgtgggtgaatcatttttacttgtatacattagtgatgcccttacaactagccatagggtgctgcgttcgttcctgggggattgggtgagaaagcccatcgtatttcacgcgcacgcttcccaaactactaaacggtgtattttttgtaaaaaatttctataagaaagttgctttaaaaaatcatattaatccatttttgaaatttaaaatatttaatactcaattaatcatgcactaatagctcatctcgttttgcgtatcttctcaatcctttccctcaaactcacccatagtgaacaaccaagtttttttttctctcctttgctttctctctctctccccaccatatcaaagaagttggcagccaaatcatatttttattttgtagtgggcccatgttataaggtactagttgggactatatatattgtacatcataccatgataaactaacaaaggctaactattttttatcccaccttaagatgtgtatatacattatacattggcattgttctaagtatgaattttttaggtgaaccaaggattctaaggtaagttgtagcggtcaaatcttaattataatttaacatatataattatactagttgtagcggtcaaaaaagatttaaagcctcaaacattatcattggtgatggtagattcatctctcagtattatcattaaggattttttaaagaagtatagatatagatcggttcaattattaataatgtacttcctccatttcagaatataatgatttttagggttggatacaagtattaagaaataggtggaattaaatgggagaatgttgcgattggttgaaaagtgcagttaggtgagaaaattagatggcagagagttgtgattagttaagtagatataatgttgttgaagaagttattatattttaggataaatcttgagagctaaattgttatattttgataccaatggagtacgtgtttatataaaggaatcttttcaacaccgtctagtgtcattagtgcaaaaagtcaagtcatttaacaagctcgttaccgatgggcatgtgccgacgcgaggcgacgactggcggcgactttgacgcgccgcgcgggtacgtcagtgtgtgtgagactgttccggctcgaccgacccgccagctagcctcgatccaagtcacgagtcacagctaagcagtttgaagtttgaaccacacgacgaatatattcgtttaatttccatttaatttatccgccactttttaaattgcaaaaatgaagaagcctaatcatcaaactcatctttcctttttgtcgacagaaaaaaaaaaagaaggcctaatgatcaaactgctttcttgtcatctggcgatttgtttcttcgttttccgatttgttcggtccatttttctaaagtttttaggtggactctcggactcgtacgttgccacaataacacgccatgcatcaaagtctggtgtgtaatgtgatgtgcatcatgctgcatcgactctgagcttaattagcacgactaaggactcaggactcacgagctagtcgcgagtctttgttagacccgtggcccgtgggttagctagcagctaccagaatatgattaatcgcagtaaactaattaatggagttatctaggttagatcttggttagcttgctagctagtccggccaatcgtgagatcataccgcaaattttgaaagcaagctgagagcgaccttatgttgtattaaggcttatgatcaacgatatgacgtggagtacgtatatacatacacaacgttaacatgcgcagaaatttacagctacataatacacgacttaggggaaaaaaaacaaatattggtaacggaattgctatgtgaagtatatctgcggttgtgggttacaagctacttcctctggtccattttaatcaagtgcagttgtggatttcagtgtctaacgtttgaccgtccatcttatttaaaaaatattttaaaaataagccacacataaagtattattaatgttttatcatctaataacaataaaaatattaatcataaaaaatttttaaattagacgaacggtcaaacgttggacactgaaacccacgattgcatttaaaatgggacggatggagtatgtagttacatagtataactgatactcctatagttatattataactaatatcatatagtacaatatatctgaattttttttcaccaaaaagacttccgtatgttatatagctactccccgatctcttacgtatgttgtgtatacttccgaaccattgctttggcactgacgaccgatatattaatggtcgaataaacaattaaatgaacccgacgaccagacgatgtgcatgtggttgggctagatcgaactgtagctctccactagatagagaaaataaaaatggaaaaaagattgaatcgtaaccatgcaacgtgcatggctcgccattgaacaatcaatcgatcagcgtcgtcgccggtcgtcatcaggtcactctacgccggctgatccggcctagtctacaaaacgtgatgtggagatgctagttgttgtaggtaattagtacctccgtcccaaaataaatgtagcctgaatatccgtatccaacgtttgatcgtccgtcttatttaaaaattttaaaaatatttagtcacacataaagtattatctatgttttaacatctaatagcaataaaagtactaatcataatatgccagcagccacggtaaaacagaggatgcaagcgaaaatttttaaataagacgaatggtcaaacgttgaacgtaaatagtgtaaaactgcacttattttgggacggagggagtaaaagcttttttttttctttccgtgtttagttagggctttattattgtgctgttatgggccgccaagtaaatcgtgtgtctcgttcaaaggaaggaataaattcacattgggtccctctgtttgtcgcccaattcaattttcgtccctcgaccgtaaaaccgggtacaaaccgtccccaacttacaaaaccgggcaaatatggtcctatggcagtacggagggcggtatcggcctacgtggcacattgaccatcctacgtggtgcgctgaccacgtttctcctctcttttttacagcgtcgcgcacgcaccagtggtcctcgcggcggagcgggagcagcgttggatggcgggagcggccgccgcggcgctcgcggcggaggacggcggagagcggcccattcgagcacgaagatggcggcgccgaggccgccgacgagcttgaggatgacctcgccgtcctcctcccggacgtaggaccgcagctcggcgaggaagtcgccggcctgcgtgaaggcgagcagcgcggtggcgccctggaagatggcggtgactacggcgggagcgggagcagcggagtatactcacccaacaccaggttcaagtcgctcacgtaagtttctccgccatgaatcacctggtccatggcatgctgtttgattgatttttgtgactgttctgatgttttgttcgttttcttctgtttccagttccacctcctgaagcagaggcagctgttgaagcaacaacgggagcagcagctcgccgcggcaacagcggcgacgtggggcacgcaccgcgccggcgtcggcccgccgcttggtctgaactcgtccggctggccgccgctgcagaagtcccaccagcaggcgtcgtccgcggtcggcatgcgcgccgtgttcctcagccctccaggaggcaaaccggaacgcacgggcaacggcatgcacgccgtcctcctcccggatgtaggactgcagctcggcgaggaagtcgccggtccgcgtgaaggcgagcagcgcggcggcgccctggaagatggcgatgaggacggcgggagcgggagcagcggaggacgacgaggacggaggtagcggccgccgcggcgcttgcggtggaggacggcgaggacatagaagccggaaccctcgtgcggacggcggcggtgaggtcggtcccctcctagagggggacgtggcgcgcacggcatgggcgcgcgagcgaggccaagatctgctgccgcacgaggcccacccggtcggcgacgacgacccgcagcttgcggacgccgaggaagggctgtacggtgacggtgccgaggtcgacggtttggtcgccgtcgacgaagacgacgggcagcacggccttgggcggcggcggccgcgtgctggtggttgagcggcgcggcgcgcccgcggagtcagaagacgcaacgaggaagaagagggagaaagggaatgatatgtggggcccacgtgggcccaccatatttattttttgtcgctgacatgtaggtccatgtgggccccctattttaaaattattcttttgtgtgctgctgacaggtggggccatagttttattgttttttaagatataattgtcaagtaagcgccacgtcaatgccacgtgggacagagacctagtcaaacaagccacgtaggcgccacgtcaaccaaaaccaccttcaaaacagctgagggaccacgtttgcccggttttcgtaagttaggggacgggtcgtacccggttttgcggttaagggacgaaaatcgaactgggtgacaaataaagggacccaaagtgaacttattccttcaaaggaggtccatcacaaaaggatggctggaatttcaaattgggcttgttgagtaaagcccacttgggactattaagtacaggttacgtgaccaacaccaaagcctcaaaagcccgaaatgcctttccgctcgtaggaggagccctatccaccggcgacacttccatattcaggctttcctcgccggcgatgagacaccggcgagaggaataagtttgtttttcatatcttgctccggattaaatcgtctcccccagccgtaaaatccggtataacacttcctctatcttcaaaatcaggtgtaaattgactgcctcgatggtttttgaatggtttctacgcatgttgatcgtggtcgactcactaaccattcacaagagacgaggttgagggaaacgtttcagccattcgctgaataagtggtaaactggtaatgctactggtttttcagtttcttatgggctttttttctagaccaccagttctttttcttcgccggcccagcgaaattgaaggaggttggttgttgcaatttccaaccttgtttctccacttgtaagcatgcttggtgttgctgaatttacttaggccgtgatggggtcaataggttttctggaccactcgtgtaaattaattggatatactaaacaaaagtaacagaaaattgagcttagtcaatgcactccaaatgagataacttattttatatagtaatgggaaaaatctactggccatttcctttggcccagtctacagctgcaggcctgcagcaggtaactacaatacccaatcaaagctccatgtttcttctcatttatcatggtgaccataacgttgctgctttgcttgaccattacagtttatactttgctagtattgcagtttactttgcccaacttttcacctgatctaatcatgccatttaatttccaagttgcatgcccctgacagagcttgacgaggggaatgtcctgattgcgtttgatatgatcagatcatctgaatgcaaccctcccagcttgcagttcactcaatccaggattcactccacgttcaacccagtctacttactgttgccaatgctatttgatcatgtgtgcatcactagtgaaagagatctgctttgcaatcttggattgcatctccttctttgtcgagtttgggcgtcacggcagcatcatccatcagagtttaatctgtaggagtagtagatgtgcaacaatggggagaagagaaaagacatgagcatatgcaatgggcgcaggtacagtagctactccagcagtagctgcatttgacgcagcagcagtagtttttcagggtctagtcaatgcatatgcaatgggcgcgcgcagttagcagagcaggcacgtcacatagctgctgtcgtgtgacccatcatccgaccacataatcccatgtcacctacggccgttggattgctgaccacgtaaatatatttagaaatactccctccgttcaaaagactcaactgctaaaaaaaattagatgaaaatctggatacccgtgatatgcttttcaaactaataaacgatatgtttcgtgcgaaaattttctatatgaaaaaactgctataaaatatcatattaatctatttttcaagtttgtaataattaaaacttaatttatcatacgttaataccacctcgttttacgtaaaacatttaatctctatcttcatctttatctttaggagaaaaaaacacataaaacaaagaagttttatctcttgaatattttttagtacatattaccattactactttttttcgatatctaaggatattttggttatttttactattcattaatttatctttggatattagaaatgtttttttacgaagggagtatatagtcaagctattaaacttattttatgattaagatacaggagtgctagattttacctaaatttttgttatcatatgttttaaactagtaaatggtacggtacgtagtatgcaaaagccgcttaaaagtaagttttaaaatttttaaataattaaaacttcattaatcaccgactaatgaatttctcgtttcgtgcgccgacacttaatcctcgactgccgctttatcaaacgcggccttaatgctgcaacctcatagtacagtcgtatacgtacgcagtgtacgtgcacgtattgccatgtatgctaggcagagaagagtaaatttctcgtactgctctcgtgtcttatactaaatcctgtagtaataaatagtaaggaattaaatggagagtgaaggtgcaaagcatggctacctgttttcagacaaggtctaaagcatgcttgattgaagttctcacttatggaccgtacgaatttggcctggaaataacactgtgctgcacattattacagcagctgttacttagagtattaatttactgattactgctagtaccttaccatcttgcgttcatcaatacgctgcagaagatccctgtccaacggggagtacatggtacatagagaaaattcttactacagcaaagggtgtgcatggcaccctcgtgtctttgtggagctactatagcttttaaggtaaatgcagaacagtgcagtgtagaactctgtttcttcagcattacatacatgcatgattcgattttatgacaaagcaataataatatagtgagagaaaaagaaacagaaagcaaaaaaaaaactgtactagcactatctcactactgcattttacaggagaaaggaaaaaaaaagaagggagagatggtgaagagaaaaaagaggtcagggcacggcaatggcatcacatgaaagcttttctcatggcgcctgcctgaccactgggcactgggcagtggctgcagaatagtactacgaagtggctgacctgaccaagctctcccttcccctagccgctggcttcttgtgagctctcggtgagtagaaggagtacagtacagatgggcatcagcctgaacaggaaggagctttttgcaccaacagaaaagcaaccccgtctctgggtcacacattggcaatggcaccttggcacattggcatggcatggcatgcacaggtgcagagagagagagagagagagataggagaaggcttgtttaatcatcatggccatggggctcacctttccctgttcatgtccaaaacaacgaaagaaatattcgagcagacgtgggagaaacagaaatcaaatgggaggtgaaagagagagagagagagagagaggggaaaagaaaggcaggacgaaggctgatgtgagggagagaaaagcaacaagcctgaatgaattatggctagcctgaatgtgagctttggttcttgatgagaaattttaaaactgtgtggcagcggcagccagcaccagcagcctgtcaggacctcagaaacactgctttgtcagagtgagaagctggcattatgttctttgtttattctatgctatagcactctctgctagtagtatatccccatccttttcctatctcccaaaagcatcgcatgtgcttatgtgttgttatgcactaatcaattacagtcttatcagtcgttagcgacactatcatgaaaaggggatatcagctttgttcccaggtatagaaatatagcaatgttggcatcagaaattcagcagtatcaacaaagttttattggagtacaggatttcaattaagagaggattatgctggcatacgtagttaatgcaacacagttgactctctgaatcgaagccacggagggtagagattggcagagtcctcggctgtcagcctaagagtagagtacagggcacagaccgtcgagaagaagctttggttcttctgcactggtgtacattggcatgccattattgtaggatcagcaagctccgaaatggcgtccatcttgctggagcaaaggaggtagagcgagtacatacatgatgaaaatggtccatggaatttattcgatcaattgtgttgggctgtctgtctgttgccgcgtttgtcttgatttcgtaaggtgtcccgttattttccttggcctgtgcaccgggtacaactcatagatctctatggggtctgctataatttgaacatggattttctgtttgaaaactagtaaatgttactactggtacatagatcccttcaaaatcggtggctatggattgttgccttctatcaatccgcaagactgcaacattcaacccaccgcttcacctttataaggttcattgagattggatagattttcagttttttttttccatacgtttaatttatcccctatcataccctttagaagggattaaaggaatatatattatacagtatatgaattcctttagtatgcccattatcctgtttatgctggcaatattttcttgtggtctactccagtttcctataaaattcatgcatttcaaacaacacgagtcttcatttctattttcttttaaaaggttctgcctattttcgcatttctgcaaataaccgccaccaattgttgtctgtctcttataaattaatatccctatatctaaaagtcttgacattttatattgtgtgatatctcatttattatgggcttattcggtatggtgctaaatcaactttactaaaatttggcattgctaaacattggcatattttgacgttacaaaaattggtagtgttggatacgtttagtttgtaacattaccaaaatttggtagtgttttcatgagaggaagtttccagaaataccaaaatttgatagggtgtcaatggcaatagaatgtttagtttgttatcttaccaagttttgataataacaatttttgataggaccgaaagtgataacaaaccgaacaacccctatatctattatgtatcatttttgacattccaaaataccatgacacacttttcaatcgttattactacatctattcaggttataagacgttttgtctttggtcaaaaatcaaactgctttaagtttgactaagtttatataaaaaagtagtaacattttcaacccaagacaaatttattatgaaaatatattcaattattgatttgatgaaactaatttagtattataaatattactatatttgtttataaacttagtcaaacttaaaacagtttgacttttaccaaagtcaaaacgttttataacctaaaacggaggaagtaattcattttctcttcacctggttgtctcttattattgtgctgtataagcatgtgtacggtgctagaacacataagcattacaattgctaataaatcacttaaataaatataattttttgctgtacaaagtgacaagaggattcatgcatttagctgcttgcataccccaactgcgcggcaaagcgaacaagattggggcaattgcatccatgcccctactttcgaagccaattgctgttttacccctattttttagggtttgcacttttacccccactttttgaatccgaagcagccatgtacccttttttaacagtcacaactaacggtgttagttgtagagaaaatgacatatatactcttggtggttattgcagttttgccctccttttttcagttttgtatgattttgcccccatttttttcagcttgtgtgagtgctataatgtgaggctttgaccggccaaagctcatgcattcactctgaacccctaaactacaggtcaatgcctgtcagttaaccgagactacgatgttagtatgcacaattgataccacatttagtagtacatagataatataacaaggttgttcttattaaaaaaaatacaacacagttgtgaattgttccaaaataaaaaaggtagtagcctcgaccacgttggctggccctcgacgcgaccctgtggccgccgccgcctcgaccatgcctgcggccatcgctgcctcgcgcatagtagctggcgcgcgcccgcccggggccggcgccgtagcctcgcgcccaccgccgccgccttcgcccccttgatccgcagcctccgcgccgcacgtacgctgccgccacccggtctcagtcggcgctacggttctaggaaaccgacgtacggtggtgggaggagactcactcatcctatccattcccttaggggtataaacgtaatatcatatttcctaaaacctttttttattttcttttgtattttttaacacaacatcgtgggacccaccaaacggctattacaactgagggtagacggttgcttcaaattcaaaaagtgaaagtaaaagtgtaaaccctaaaaatagaggtaaaacaacaattaaatttaaaagtaggggcatggatacaattgtcccaacaagattacaagggacaaatggaagactccacttgtttggcagtgggctataagaatgtcctggtggaaccggttcatggaatgtctctctaggcagcgctggcctcaaagaccgggtccacagaacagctaatgttttttttcatcaacacttcagatgctctcctgttgtacttgtgttcctctttattgcccaaaatgcccctccatggacaaagttgaaagttcaggcagcatcgttttagaattttttgaaagagctcaagaaagctcttgctttacataacagtgaaaagatgtcaccggctgaaatgcagtttaaacaattgatacatgtcgccgtcattcatgaaatgatgatcgctaaattatgcctacgtcacaaatggttgaatgttaaggatgattggaggcaaatgaacatgttcttcccaccatgagaaattcagtatctcctcatctgcttattactatttatcattttgacctctcccgtttatcctaaaataagttcattgttaaacaatcattatatcaagatttatgaaaatagaagataaatttgtttggaataaataaatattgaaataattacactgtgatttgataaagtagatgcgttctattttttattggtatatgtactatgggagaaaataatttattttggatcgaaataagtactattttgctatcttgcggaagaaaaaaaattataacgttaatttgtgtttcagatgttacatcagtccaataaagcatgcacgttggagttttctcggagaaaaaaaccatctttctcagagttcggtattggtctgcctaacccagccaaaaccgtcgaacccgtgttgttttacgcctaagaaaaatccaccatatgcacgcggtgagggaaaatgcataacaaacctcccgaccgccataggagtagtactatctccgttccaaaatactataagttataaaattaaatatgattattaaaaaaagattgtaattggtttaaaagtgaaggtatataacaaaataaacaaatagtgaaggattatgaccggttgggaatgaagtgttggcgagaaaatattagcattaaatttaagtatgaaatagtggtgttcgtattgaaaaagtagtgtccagtactaattttttttgattatgtggaatttatgaaaactatctttagtatcttaggttgggaatgaacttagagcagatacaatagatataatagcaggctataagccagctataaacatatttgaaagagataaaggaagagagagaagagcagcgaactacagatctgtagccagctgtagcacagactccaagacgtaatgtgtgtatgataggtgggactagatattaatagtatagtaaacaattattatataaattagctaatatattatctataaataatttggagtcagtagttgtctgtactattaacctattgcacacgagatgacgagaaggagcaggtggtaaattcccgcagcttggtgggccccacccgtctcccctctgcacgtgacgcctcccccccgccccgctagctccccctccttcccccgccccccgccaccatcgctgtcgccgtatcaccacagtatttctacgagaccaccccccaccgctgccgcgcccgccgccgcggaccgcccccaccccacccacccacccccccacaaaaattcccccaatactactactactactactactaccactaccccaccgcctcgccgccggagagcgcggccagggagaggctcgccgcgtaccgacggcggcgtaagctgtgtggtgtcgcgaattcccacgcctcgctccgtcgcggcgggcgctggggcgaggagtaaagaaaagagggagggggctcgtgttacggggcggggattaattaatgcgggtttagtggtgtggtgcgcgggctaattattatttttagggtggcgcggctgctggctttgctctcttgcttgctcttgttgggaactcgcgaaagcttcggttcttttgagaagaagagaggaggcagccactctcgcggtgtctcgcgcctcgcctcgcctccgctgcgcttgtgcgctggtctgctcgcgctcctaggcggcgtgtagtagtgggtgctttgctgcgtggcacgggccgggccgtcgcgcatttccgcgagcacatggtgggcattgggtggtgggagggggaagaaggaggaggagtagatttctgagagggaggggggatatggggaagccggaggcgaggagtgggtggaggaacgcggcggcggcggcgtgggtgctggtggccgtggcgtgcgcggcgtacatgcactggcacctgcggcgggagaccatggaccgcgccgaggagcggctcgtcagcatgtgcgaggagcgggcgaggatgctgcaggagcagttcggcgtcaccgtcaaccacgtccacgccctcgccatcctcatctccaccttccatttcgagaagttcccgtccgccatcgaccaggtgagccgacgacgcgtaaagattgtttttttccccttttgatgatgcatcgttgttgctgttgctgctgtctgcttgtaatgctgcggcaatggcggaatcctgggatccctctaaggattggtttgtttaaagatgggtttgctggttcttgatgcttccaggcatgcggcttagtcgtttagcggtacattattgctgtagttggttcccatgtggggctcttgatgtttgaatatgtggcattctttgagtagttggggtttttttatgctcacagacgcctctgaactaactaggctggtagctcgttattttgtttatgcactggtttaatagttggtaatacgacgttttgattccttttgtttatcaggagagaaccgctgcagctgttcagttctgggatcttgacccaattcttatattcttttcgagttaggccctctgcttttgtaactgtaattttaggagtattatggtgtggaactgtgctgttttggacacattctgcctgtagtaactggcagcaaacagtaacgaacaaatctgatccttagccgtagttgtgtatctgcatttacaaattgttgatgaattaagactcttgacataattagaaccggaccgattcgggggactgttaatttcatcacgacattccttttttatgcctaggctatttcatcttggttcttacagaatctagcattttccttccttctactgtgtttcattttgcattttgtgcaatgtttgctgcaggatacatttgcaaagtacacggcaaggacatcgtttgagcgcccactgctgaatggagtggcatatgcgcagcgtatcttccatcacgagagggaaatgtttgagaaccagcagggatggattatgaagacgatgaagcgacaggctgcgcctccacaggatgagtatgccccagtgattttttcacaggatacggtttcctaccttgcacgtatcgacatgatgtctggggaggtgcgatttcttgttgcttgatgtttcttttgtttaacatttattgatggtttcttgtaccctcttaatttctgttttgataagctgatcgtttaattcccaatacaggaggaccgggaaaacatcttacgtgcaagggctaccggcaaagctgtgttgacaaacccattcaggttgcttgggtcaaaccacttgggggtagttctcacttttgctgtgtatcgccctggtctagctgctgatgcatcagttgaggagcgtgtggaagcaactgctgggtgaggagattgaagtatcttttatattctatgatgagttgggttgcatcaaatgtccattatttgtgttgcaatcctatgcatatatagtactgaaattcaccaaaacacacaaagcatgggataatttggccatgaggccatctagtacctcataatctcaaaaccttctgtaacacatgaacttgaattcgtagtgaatagtgattgattattgtgtaccttattgtccatacttcagcaaaaggctcttgcctgatcaattgatctggaatatgtagtaagctcgtgctgtttttcacttgtttctaacccttttttgtgtgtcaaacttaaaaactcagtataaaacagtaaaagagagggtaagtaggcaagaatgcattgggcaacatcatattattcagggccggccttccccaaagttttggattacttattacccattgtgatttgaaaaagtaaataacatcccaagtgaaagcgaattttcgtcatttgttagccatatgcacacagttgtttggttgttttcttttttacctgaacagttgtttggttgttgtggtctcatcaaatcaaatccctactaacagatatcttggtggagcttttgatgtggagtcactcgtggaaaatttgctgagtaaacttgctggcaatcaggatattgtagtgaatgtgtatgatgtcacaaatgcttctgaacctatggccatgtatggtcctcaaagtccagatggtaaagtgtccctcttccatgtgagcacgcttgactttggtgatcctttcagggcgcatgaaatgaggtgcaggttggtagcttctttctcatggcataaatttgttggttgcttcttacttggctcttgcactaattctggcaacctgagcaggtataggcaaaagcctcctctgccatggtctgctatcactaatcctttgggaacttttgttatatggatgcttgtggggtatataatttgtgccgcatggtctcgctatgataaagtttcagaggattgtagaaagatggaagagctcaaaactcaagcggaagctgctgatgttgctaagtcccaggtttgacacatgtttcagtgctctctctgactatgatttctagtatatgtatagatgtatttatatttgtattttccacttgcagtttctggcaactgtatcccatgagatcagaacacctatgaatggcgtccttggtataaatttgttctgtgtaaaacttgaatattgtccaatccagtcgtccagcgatctaaaattctaccttttgatgtaggaatgctcgacatgctcttggggacagatctgagtatgactcagaaggattatgctcagacagcccagatgtgtggcagagcattgataacactgataaatgatgtacttgatcgggctaagattgaagcagggaaattggagcttgaggcagtgccatttgacctgcggtctctcatggatgatgtgatctccttattttcttcaaaatcaagagagaagtgcattgaggtatctttcttttacttggcttcatttatgaggatagttactgcactcttatagtcatgatatggactacttccaagtaacccttccattgtggttgagtgactggcagatcatgcagttccaaacatgccgattatttatctatttacgctccgctaccttattctttccctacatttccctattgctgcagcttgcagtgtttgtatgtgatgatgttccaaaagttgttattggagatccatggagatatcgacaaatactgacaaatttggtgggaaatgcagtcaaagtaagcactaagctgtcaagttttttgctatagcgacttttatgtgccatttaatgaagctgagattgtttgaattatttaattctttcacctcctgaaataatttctttgcacacaattcctatatttaaattctgatatagaaaatatactaagtttaccatgtattatctcagttcacagaacggggccatgtatttgtgcgagtctgcctggctgagaactcaaaagtggaagctaatcaagtccttaatggaaccatgaatgggaaagacggcaaagttgagactacagctaatggcgccttcaatactttgagtggttttcaagccgcagatgagcgcaataactgggattattttaagctgctgctatctgataaagagccccatatggatgagcttgagtgcgacagatcttatcaaaatgattgtgactgtgtgaccttgatgataagtattgaggatacaggtgttgggatcccattacatgcacaagatcgtgtttttacgcctttcatgcaggctgatagttcaacttcaaggaactatggtggaactggcattggtttaagcatcagcaaatgtttagctgaacttatgggcggtcaaataagtttcactagccgtccatttgttgggagtacatttacattctcagctgtcctcaagcgctcatgcaaagatacttcaagtgattcaaagaggagcttatctgaggcactaccaactgcctttaagggaatgaaggctattttagtagatgggagacctgtacgtggagctgtcacacgatatcaccttaacaggttgggaatagttgttaaagttgtgaataatttgagtatggggcttcagactttagctggacaaaatggtgtgaaagagtccaggtgagtcctctaacaactcatttccaattcctaacaaggcctctataaaacactggctccagttgtgtgatgcaagagggaccaaattagaaacaagagacagtattatgtgatgcaggggctggggatgtagtcgtcttccttatctaaatgaagttaatgaaaggtccaaacccatagtgcatttttaaagtagaacttaaaaccacaaagaaccagattgtacacctcagtgataataataacaaaataattcatatactgcacattctttttgaatgcatgctaattctcctttgtttacctacattgtcattttgcagggagaaactgtctatgctttttatagagagtgacatctggaggcctgagacagatatcctattattgaatcgtctgcatgagctaaagaataatggtcaggtgcatgagttgccgaagctagttcttttggtaacatcagaagctgacaaggacagatatggatccgcatttgatattgtgatgtataaacctataagggcaagcacaattgcttcttgccttcaacagttgctaaaagtagtgatgcctgaaaggaaagacaatcaaaataggccctcatttctccgcagcttgctgattgggaagaatatattgattgtagatgataataaagtcaatctcagggttgctgcagctgcgctcaagaaatatggtgccaaagttcattgtgttgaaagcggcaaagatgcagtctccttacttcaacaaccacactgctttgatgcatgctttatggatgttcagatgccagagatggatgggtatggatccaataaacaaacagctgcattagtcaattctttttttttattgattgtcttttaaaataccaaatctttagaggaagttgctttctcattttactgtttttttatgtgtcaaagtaattactaattataatctccattttatgaatgctagtcactgactgttgatgaaatattgtataggtttgaggcaactagacaaataaggcaaatggaggtaaaagcaaacgaggaaaggaaggcgttggatttaatggagggttcaacattcgtcgagtcccatttgcctgttctggcaatgaccgcggatgtcattcaggcgacatatgaagaatgtataaaatcgggaatggatggttatgtgtccaaacctttcgacgaggagcagttataccaagctgtctccagattagtggtgggaacgaaggaatcagcggtatgatgatggtctggctagtggaacagatctgatgtgccatcagttgaaagcattgccatctcgctgctgtcaagctgactctaactcatacatacatctgacatgagaatttttcaccgagagtagatgaaaggttgcaagcactttgagctagtgaacttcgttcaaccaaggcaggtgcatgacagttgaggtttctggtgcagctcaagggagtggagtgagtgatagtagatagatccctgtagttttgtttttcctttgctgttgataggtagaggtgttgtatgttcattctttggaaatatctcgtctttgtgccatactgtcaagttccagaaacccctgggaggaaaaaaaaaagtgctcgaccaccatttgagctgtctcctgactcctgtttgcatatgcccatggaagattcgatgaaatgtttcccttcctccgccaataggatggaaattttggctgccgccgttgttgccttttgagatgattgcgttgtttcacttatcatacacagggtttatgattccgagatgtccttatgttccgggctttgacggtacgacggttttcgagaaatctggtggaaagccggtagattttgaacaaatttcataaataaaattttgaatacaaattctgtgagtttaccgatatgctcgtaaaaaccagttggtttcggcgaaattccaagcgaaatcaagtgcaggaccacgacccgtctctattctacttgggctagtacaaagtgggcctactacatggaatacagcttctacttttgagccacgtagaaacctcggttttttacggaattcgatcagttttcatcggaattgacgtagaaacctcggttttttatggaattcgatcagttttcatcggaattgtggacctgatcatacatgggcaagctggttgtcatcaactcatcatcgcctattttgagtttcgactttcgaagctgctctcagttgcatagccgggcagcgagcggtggtgtgagactgagagtgacgctatcgcgaagccattctactattccacttggtcagcagaggtgagacgagacggcaatcagcgcaacgcccagtcgcgcacgcccgtcacgccgaccttgggctgtgcgagtgggacgcgcgggcgcgaggtggccggctatcgcgctgcccccggcgtggcgcggcgtgccgggttgacgacccgcgcgacgcgccgaggagagaggcgaggcatttccgtggacgcgacaccatcacgccgacgcgaccacgtatacgcgaacgcgacgccgcggccgctaccgcgcgcccaaacggccattcaaccatccgtcgaatcggagagcgcgcgatcctcttgcgttctcccagcccaatcatatgcacactgctcctgagatggaaaacccaactcggatgcataggcaagtcttgggctctcttccggtggccgaatttaaccggagcatacggtacggtacgctgaattttcagctgggtttccacccaagtcctgaaaattccgtagtccgcagcgtatgttctagatgctgtatcatagacatgagtccacgcacgactccacgccgtccgcggtaacgcatacatcaagaacagtcgtctcggggctacaccaatcactatttttacaattttacatctgttttatactagtacaattccattccactgtatgcagagcaggcaaaggcacaaaggctgaaggttataatactggtagttcattattatgctgaattgttcattcctgggtccaagatattttggcccaaactattactccatgtcagcttggcaaagtactcccaagtcccaaccatatgaaaatcagctcatgcgcaatcctggtaggagcaccttttattctcttcagaacatacttacactgttacactaaacgtacacaactggttcaattaaactaattaattgctacattaagatcacgatgagtagagagaacagagtgctcccaagtcccaaccatatcaaatcagttcatgtttatccctgtacttcttattctcttcagaacacatagaccctgttccaccaacactaaaacacaagagcacatccagaaagaacacactaacacacagcaggtttaaattaaactacttatacttgtactatcccataaatcattgtaggtttagccgtactgatcagtccaacgactcttcaatcagtatgacaaaactgtcctgcgaaattaaagcgttggatcatacaaaccactggctgattataattcagccatattaagatccttaaagagtaaagagagcatagaatgcgccacatcacctaaaccccaaagctgaatgccatcatccaagatacaaacttctgcacttgcagtccatccgacgatggttggtgggatagcagcaactcaccacacaattatcttcagacctacgccaatacggagcagatcgagagatagtagcagtagcagtacaacgcgagaacaactgcgacgacgacgactgcgacgctaaccagaacaagatcctggcttaacattagcattacccaacacactctgcttttcttttattagttcttgatcacgatcgagaaagagaggttaggaagaggagatgaaatatattcgagtgggacaagcagagagaattcgaataggtttcgtttacactgatgcgatttaatggaatttatgctccgtgagcccaagaaacgaattttggcgaaaattattgtactaatcgtaccacaaagatacggttggctgaagatatgttcatacggatcaagctcagtccgtccaggtactaagcttcagcttcagcttaaaaccaatcaaaaaacttaatgaactgtccgtttaaagaaaagtttgtctacatctcttcagacgaatgaacaatttgtacggcaaactgaaaattttgccaaaataattagtaattccggcgtacgcagtattgcagtaaggtgtccattcgaactctgtccatctgtggtgaagagaatgaactaacaacctctccatcgagacttatggttgaatctgacaggtcatttctccaagtcaaactgcaaattttgcagtctcttgcaacttgttttgatgcacaagatcgatcgattctagcgacacatttttgttgctctcgtgtcccttatggacatctctagctattctgtcgcttttacaagcacgcattgtgtacgttttagttagatcaaacacatctttcttaacttttctttcttccttattaaggacgatcacaaaccatgcatcgatcgatcgccgtcaggacacttttttctcaagtgatatgatatcacatccctcacaactacgcaactgagtttcagacttgcagattgtgaattttttccttttaaagattagacttgcagagttgtaggttagttccatggtctgagatgtgaagcaaaattggtttgcgattggtaactgatcagctgaaaatgccaaatcatctaaggtgatctttctgtcctcaatcttttcatgaagcaccttaactgcaaaactatgtcaaatccattgcaatttgcaaaggtttccaaatctctcgtgcaatgcctttctgtaccacccgcttgacgtcaatttccgcatctcattatcaagtcgtcaaaaaggaaagagagagtcgtttatgacacagataatctggcgattgcatgttggcagcatgttgctgttaagcttttgccttacgtgaatgaaactttctgcagtttttttttttttgggaggggggggggggggttgttcctctcctcatgtgagtcaccatgacagcgtggcatccgactggcaggtggggtccacgtacgctcgcatacgtcatcacaaggtcagcaagacatcaacatgtcccgatgttcgcccaatgtacaggctggtgttcagtgatggtgagacttggcacatggcgaaatggggcccagaggcagcggcagttgagaactgaaaccgactgcatggtggggcctcctgcctctctaatacgaagggcagcatgttgtctgataaatttggggttgcaggtagctgataatttaatttagattgactagaataaactagtattagatggttatgaaggtgatgtgagtgacacgaaattggagggttttgtgactggcgaggagaacacgttgcagcaaatgttccatgtgcaccttctgcaaaacactgcacaaaaacaaaagtttcatgtgcagtacatttcccttgaaatgtgacgttatggaagtagacgggccagcaatttcaaatgattttcagtagtgtagctcactgcacttagctgcacacttaaggtgatgttactgtctttgtgtagcttctctagagctattcactcccaagttttctagagttatttgctccaatcttaacgaccatcagactcagagtatgattttcagaagcaaccagactagaacgaactaaatgtcagccggttgccgtgaatttcggtggaaatgaatcatggccaaatgttaggcgattttgaagaaattatgtggctagtacattacaccgacgattcgcccggccgtggtgtatccagtgaatcttcctgaaagaaagaaaacgtacgagatgtgcagaaggttcagcgaacagcagccacaaaaggagaagacatccccttaagaaacgtcagaaagtttgttagggtgtggtcaaccttcaggtcctgacaatgcctagacatagtgtcatcctatcttccattttgactcatctgcacatacacatctcgaattgcatggcccacgcgagtacacgacaaacgcacaccgtctaatcacccattgacaatgtcacaaagcaggtatagatatcacagttgctgcgtggccatgagactgaagatgagatgagagcatcgtctcacaagattgtagtatagtattttttttgtacagtgtatggcaccatatggatgcatgctaccaaaccaacgtagaagggacaacaaatcgaataggatcgcttgttaacgcgctttgaactgaccgatcaattaagccttctcatttggtcattttcagtgcttctttctcacacgtttatgtggcagtatggaggaggattagtagtagtatagtagtatatgtccaaatgatccaactatccaattttttttctcgaacgcgtaaaaggattgcacgtcaatatattaaaagataagaatattcgttacacaacgcattaagccagaccgacttataccgatagagttatagcaagagaggagggaaacatccaactatccaatgcatgcatgcgtccattgcctcggccagacagacaattattggttaattaggcaccactagaaaccatatataaactgtagtcatatatatacattagtagtatatagtattatgcaagcaagaaagaaattgtgatgctttgtagcttgtcgtgtatcatcatgtatcagcctagtcgttttgctgattgatgcattgcatatgcaaacaaatgtttccggattatggggcaacaggacagacatttgggggggtatatgtgggtgctgaactgatgtttaatcaaaactgagcacgggtatatttaggactttgttgcccaaccgcgtaatctgaaaatatttgaaatgggaccgtcctaattaaaaagggaatgatgacttgctgagtaatgtacactaattaaggcagtagttacaaacaaaaaaaacattaaatgcatttctaggctatctttttcactaaattgctgaatgattttgggataactattcgatatagaaatgaatgaatgaactattatatagtttaaaaatagattatatatatatatatatatatatatattaagaaattcatatataaaaacttttttctataaaagagtcgtaccgtttaggaatccagaaagcatactgctaatgtaatggttacattacttagaaaagaagacacgtatatgagattatatacatgtacacatatgtgtatgcaagcctactactcgtacaaatcacctctactagtataaaaatatagctagaattaggatatgtaaaaaaatggcttggtgcacgagtcagtgccacaaaattagtgaacaatatgcattataagcttacttgtaaatgtggccatgataatgaagataacataaaccataacccttaaaagaagttatatatatactgtttcctgtatacctgaagtggaccttgtgtacacctggtagtatcatattaaaaacgagataaggaaaaaagttgtctagtgaaaagtattttaaaagctgcagaaaacacacattaattaattatcatggctaccacaacttcaacgagaggtagttcgtttgtccaatcaagcccccgacactctatcgctctctacaaaaggaaaaaaaaaaaggcccggctaatacagagagaaatccccacaaacaataattaaaaaccaattaattagtgcatgcacaaaattatcgggtcacaaatagaattcggcgtcattagccaccaaaacccattattcagtgaccttactggatgaaaaaaaaagtttaagaaggctataagaggtggctctaactagcttcactttaatttcctctcattgcttgagaaaacagtttacggagaaaggaatatcgagacgtcccaaccgcaggagaaaaaaccagagcaaaccaaacgtttggttaaaccaagccaaccaagtgaagctaacatatgaatgaatcgtgcattgatgcatatactccctccatactcataaaaaaaaccgtttaggacaatgtcaaagtcaaacattgggaatataaattatgaataactattaagttgttgagtttgaaaatataaaatttatatgaatagatttgtcttaaaaaatactttcataaaagtatacatatatcacttttcaataaacatttttatagaaataagaagtcaaagttgtgttttggagaccacgtcgctatccaaaacgactttctttataagtatggagggagtatattgctactacctttatcccaaaatataaaacctaaaactagataggatatttcctacttcatccgttttacaatgtaagactttctagcattgtccacgtccatatagatgttaattaatctaggcacacatataaccattaacttctaaatgaatatgagcaatactagaaagtcttacaatctgaaacggagagagtagtacaatgtgttcggatagggagcctgtccgaatatgttgtactccctccgtttcacaatgtaagtcattttagcatttcccacattcatattgatgctaatgaatctagacatatatatatatatacgtatatacgtatatatatatatacgtatatacgtatatacgtatatacgtatatatatatatatatatatatatatatatatatatatatatatatatatatatatatatatatatatatatatatatatatatatgtctagattcattagcatcaatatgaatgtaggaaacgataaaatgacttacatcatgaaacggagggagtatagaaaacgttccatccaatactactttttcttatattttgggatagggagagtagcatatatgcatgtatctctctcctgcgacccactaaattagcacatgtatgcaacagcaacatgcatatatagtactgcactaagaagatcgatcacaatcgtttcatcaatgtaatcaagcaggtgtacaatacaaaaggacgaagcgtattagcagctagcaagaccagtacgtacgctgcgcgcgtgctacttaattagcacggtcaaaaaatgggatttttattggccaaggaacagtgagtgattaagctaagaaagagaagagagcgacagagacagccggacagaggcaggcaagaagtttcaattggcataactcggtgaagctactatcaacgtatgaatcccctgtcccttgcctatcctacccacctgcatactccatccgtcctataaaaaaccatcctaatatcagatgtgacacatactagaactatgaatctaaacatatatatgtccagatttatatagtactataatatatcatatccgattttagattcattttttattggatggagagagtaccaaatgtgcaccaaacgtggcactgttagagacatagagatgtagtggtaagggtgtgtggttttaactcaaaaatcctgtatataattcccaacacatttatatttttttaaaagaatgtttggagggacgtttctcactctaaatctcattttctagagagatgtttggaggtacgcttctcactctaaatctctttttagagagagaaagagaggttaattgcataattgcatgtacagtgtacaatgtctgtcagtcgaacgatgggtggagcagcagcaagcagccggtggagagagcgacggaggaagacgggctcaatcgatggatcggttgatcggagccgtccaaatcgttgccgccggggagtccctatcatggcgggaaagggatcatgtggatatcactataggtagtttcatgtatatacacgcacgcagagaatacacctgtagatcatatactagagaaaaaagacgtatgattgtacatagtagcctgatcagatttttttttaacgaacgcttgatcagatttttaactcaagacaattaatcttcgctggatgacacagcacaagaggaaaattcaacgaatttgaaaaaaaaccatgcttgacctggttctagttaatgctctcggctctcgcaaggtagctaagctcgtgctatgctggttgatactgtatacgaacatgataattgtaattaatgagtagcagtctggtactagatgcgatcatctgtattatcatttgggagaaagtcggacgctgcagctatcatctcgaacccaactattttgatttgaccaaatgtcctccgatcctacagtgcgcgtaaccaaccaaatgcaatcttggcgaaacatgctcgttccccgacaaaatccgccagaatcatatatgtcgggacagcaagcctcgccaatagtcaaacgtaaatcaaccgctcataaccactcgtactactactgcatagtaacatgcgcaaattaattaacaccctctattttgggtttgattatcacatcagatatacggatacacatttaaagtattaaatatagtctaataacaaaataaattatatattccgtcagaagctacgagacaaatttattaagcctaattaattaatcattagtaaatatttaatgtagcaccacattgtcaaatcatggtgcaattaggcttaaaagattcgtttcataatttacacgcaaactgtataattggttttttattttgtccatatttaatattttatgtatgtatctaaacattcgatgtgatgattgaattttttttcaactaaacatggccgaagttctctaaattaaacatctgacccagttcactaactcccctgtccaaaagtgctcaattcaagacactgtaaaattagttacaccgtccaatgtgcacacgggttggtacgtgtgcttgcgtttgcgttgcggtgcagcgcagggttgatcgcgtccgtcccatgcgttcgcagcagcagcagcaaccatcagccaaccacgcgtccacggacgcaaaccgattcggcgcacgcgcgtgcgcgagcgcgcgccggtcaaaatctgctccgctattgtagcttttgctcgctttgcttagctttgctcctcaccaaacccccccgatcgaacgagtccaccacacgacacaacatcacacaacccctccaactccagaggcaaccgcgacgcgggtgcgcgcggcttatatttttcgtgcgtttcctcgcgctcccagcctttctttgcacacgccacacaccgagcaagcagaggaggagtattatattcttcgcggggccgagccgattcaacgcgcagtgctcgctcgcgcgcgcgcgggagcgtctcggggttggacaccggccggcccagcttcctgtgaaggatataagctccctgcctcgttgttcaactgctcggcgtcgatcacgcagcgcgggagatcgcgcaaagaaccgagaagagctcatctcatccaccatcactcgcgcagagagatcgatagccacagcgcacaagcaacgcgccgccaatcacatgcgcgcggcggtgcaggggcgggcacatgcgtggacgacgacgacgacgacaccgccgggcgcgatgagaggccgggcgctggtcctcgtggccgcgctgctgctgcagctgcttctcctcgccgctgccggtggcgcgggcgcggcggcgacggagaggaaggcgcacaactacgaggacgcgctgcggaagagcctgctctacttcgaggcgcagcggtcggggcggctcccgcacaaccagcgcgtcgcgtggcgcgaccactccggcctcaccgacggcctcgagcaaggggtacatggacgaacactactccattgcgcagcgagaattcgatggctagattgttactaacttggatggtggttaattaggtggatttggtgggaggctactacgacgccggcgaccatgtcaagttcgggctgcccatggcgttcacggtgacgatgctgtcgtggagcatgatcgagtacggcgacgacgtcgaggccgccggcgagctcggccacgcgctcgaggccatcaagtggggcactgactacttcatcaaggcgcacaccaagcccaacgagctctgggctgaggtacgtaattaatcaaatccttcacctaaactgcttccatctgatgacggcacgatcatgcgtgagaccatttctgatctctctctctcatgcatgacgaaattgtcctagctgttgaacacaagctacaacatatagagatcaagagaccagttcagttatcactactactacttgtactttactagttcttttctttttcttttttcttttttcttttcttttccctcctaacattctgaacgtagccaaattatattcttgttacgaagaaaaggtgttctttctggtgaatagcaacaaccgtgttaggtggccagtttgatggagcgtacgattacgaacattaaactatgcgtttccacatggcgtagtagtgccaagatttcgaaatttttgctcacttctgccaaaattaaaacgctgaattttctttctaagaaaagaaaaccgtgattaatttgcaggtcggggacggcgacacggatcactactgctggcagcggccggaggacatgacgacgtcgaggcaggcgtacaaggtggaccgggagcggccgggctccgacgtcgccggcgagacggcggcggcgatggccgccgcgtccatcgtcttccgcaagtccaacccgcactacgcgagcctcctcctgcaccacgcccagcaggtactaactacacacataatccagctcaccaacgtgcaacaaagtctcgtggattaattggatctttctggatcaattattatttcggcgacgaagaaattaaaatggcgaaaattcaaatttcgaaattttggggggtattgtttaccagtacgcgtaccgaattttggaccgttgcgtgtacttgcaactttagtcaagatgtgccggactttttctttggatgcgtatcagtattatagtattttctgagaaacatcattatagtattagtgttagtgttttggatgtgtgttctttcttgtgccttgtgcggcacatgccaacttgtcaacacgacgacggcaggagaaaattttaaattttttccaaaaaaaagaacattttttttgaggtgagaagtctgtgtcggttcgtagatagctgctggcaagctggtggctggcatgcggggccaaggagccggcacgcaacctaacgaggagaaaagaaaaaaaaaagatagttagcatctggtagatgagaaactttccatttgctaactcgttttggtccatgattaggtcgccagttcaatcgcataaactactccttagaaaccaagaaatgtcgtgtcgtcatgcgcgaattgaactagtccgtagctccgtatgcatgacttttttccagcgtcagctatgacaacaaaaaaaaggtcttattaatatacgtactcctcatgattaaatgaattttgctgaatacgtttgtgtacgtgtgtgcagctgttcgagtttgccgacaagtacagagggaagtatgacagcagtatcgccgaggtgaagagctactacgcgtcggtgagcgggtacaaggacgagctcctttgggccgcattgtggctgcaccgggccaccggcaaggcccattacctcgactacgtcgtggacaacgccgactgcttcggtggcaccggctgggccatcaccgagttcagctgggacgtcaagtacgccggcgtccagatcctcgccgcaagagtaagcccaaacacagaaaaacgttattactgatgaacttgtccagactttgtacacatattcgacacacgttctaacggtgtattgtgtgtttggtgacagctgctgctgagaggagagcacgaggagcggcacaggagcacgctggagcagtacagggcgaaggcggagcactacgtgtgcgggtgcctggggcggaacgcggacggcggcgcggacgcgaacgtggagcggagcccgggcgggatgctgtacgtgaggcagtggaacaacatgcagtacgtgaccaacgcggcgttcctcctcgcggcgtacgcggactacctgggcgacgacgcggacggcgccgtgtcgtgcgcgggcggcgagacggcgggcgcgggcgaggtggcggcgctcgcgagggcgcaggtggactacgtgctgggcaccaacccgagggggatcagctacctggtcgggtacggcgccaagtacccgaacagggtgcaccaccgcgccgcgtccatcgtgccgtacaagcacagcaaggagttcatcgggtgcacgcaggggttcgaccactggttcggtcgccggagctccaacccgaacgtcctcgtcggcgccatcgtcggtgggccggaccggcgggacaggttcagggacaaccgggagaactacatgcagacggaggcgtgcacgtacaacacggcgcccatggtcggcatgttcgccaagctgaacaggatggcccggcaggagagggagcaggaggaggtggcggctccggcgaggagtacggcggccgatgtgtaaatagattaggttatagagggggggctgtacaattttccccattcttttgttcatttttcttctccttctttggagatcttcttttcacacagattggaaaaattcattttgtatacaaaaagagaaagggacgggtggaggcattcgcatgcaaatgtaaattcgccaccggtacatacgaagaaaaagaattttatcatttggcttccctgtacgtgtgttccatcggtgattttgttatgaaaatagatgcacaagggagtgcgtcgacggcggattacggcggcggcaaccagcggggagggaagagggaaaaggcgacgaggtcacgaggggccgattcccggcggcgagagcatctatgcggctacgggaatccgccccttgctccggattaggaggaaacgcatcgagggaggccggcgacgagaggcgcttccgagctcgggcggcgacggcggcgagcacacggcgagcgacggcaacggtcggggcggcgccggctagctacggggaggctactcgtgctactacccgagtctaaggggaggagatggattgaggagggagaacggggagatgcactaccgagatgaggcggggcgctgtgacgagaggccgacggcgcgggagtaatctctccggcctcaggccggggaagaggaaggagagggcgcgcccgaagtccccttccgcgtcctcgctcgtgccggctcctccgacacgcgcaacgacgaacggcgacggcgaaacagaggggcggcaacaatggagtggaggcgataggacaacgagaggagaagagagggagggcgcctgggctttaaagggcggcaatgtcggtttggaaactgactttgggcggtcaaggcgcgagctggcgctccggctagcggccaaatcggcgacagggcggagggaggatgacgccggcgggaggaaaaagggggaaaaaggagggagagaaagggggcttgccccttgcctctttgggaaaaggaggaggggagcgggggcgacgcggtagagggaggagggggctctgcctccgtcccttgacggcttgcgcgcggagtggtggggccgaggcgatgacgacggcgatgacggcggggcggtgtggagcggagcggcgacacgggcgacaggcgcgggcaggcgcgacagagggtgacggcggcggcgaccaggcggtcggccaccacggcacgcgcgcgcgggttgcaacgggaggcgcggcggtttgagcggcgcggctcgggcacgcgcgctggcttgcggggctgagcggctgcaggcgcggcagggcagcggggccgggcggcgcggacggcgcagacggcgcggctctcgcgcacgcgcgcgcggcgcgcgggtggagcggagggagagggagagagagagagagagagggcgccggggagggagggggagatgggccgagagagattcggcccatcgaccctgggggaggcaaaatagacttttgtggaggaatttgatttggaaagatttggattcgggattgaactcgacgatagatcggggatttgagatcttgagatggcacggacactagacaacaagcaaagaagcaaatttcgcaattagggtttttaagagataattttcccgctaggcgccacgacggaacgggcgctacagaccaacccccctaacaagaatctcgaccccgagattcagcacctaagggagcagctccgggaactcggcgcggagaagatcttctcgctcccaggttgcctcatcttcagaatggttgctccattggactttgtagaacttgatggtcttcctttgagtctgacgttctgcctcttcaagaaccttgatcggtctttccttgtaggtcagattcttttccagctcgatactacccagggggacttgctcttctggaactcgaagacatttctttaactgggatacgtggaacacgttgtgcacatctgcgagaccttcaggtaactcaagctgataagccacttcgccacgtctggcggttatgaggtaggggccgatgtagcggggtgctaacttgccggacatcccaaacctcctcataccacggaggggtgatacccgcaggtacacatgatctcctttttcgaactcaaggtcacgcctccgattgtcagcgtaattcttctgacggttctgcgctgtctttaaacgttctcggattagcttaacttgttcttctgctgccttgagtatgtcaggaccgaataccagcgcttcgcccacctcattccagcacaagggagtgcggcactttcttccgaacttgcctcattcggcgacatctgaatgctggcctgatagctgttgttgtatgagaactcagcatacggcaaacaacgatcccaagtgccttcgaaatccagagcacacgcacgtagcatgtcttctaggatttggtttaccctttctgtctaaccatcggtctgcggatggtaggccgtactaaaatttagatcggttccgagggcttcatgcaactgcttccagaaccttgaggtgaactgagtgcctcggtctgacacaatcttcttgggacagccaaatctacatacgacatgggtcatgtagagttctgctagtttctttccatcaaaggtggttttcactggcacgaaatgagctgatttcgtgagtcggtccacgattacccaaatggagtcgtacccgctaggggttcttggcaaaccggtgatgaaatccattccgatctcttcccatttccactcgggaattggtaggggttgcaacagaccagctggcctctgatgctctgccttgactctttggcaaatgtcacacaaggctacgtattctgcgacatctcgcttcattccagcccaccagaagtatgccttgatatcttggtacatcttcgtacttcctggatgaatggagtaggcggactcatgagcttcctttaggatgagatctcttaactccttcttggccggtacacagatgcgtggaccgcaccaaactgtgccttggtcgtctatggagaaatcggtgtctttcttctcctgtattctttttattaactcttttatcccttcgtcatctttctgagcctcccggacttgcgattctagggtaggctgcactgtcaagctggcagggacacctgactgtaccacggtcagccttaacttctccaattctctgcacaggcgatcttggtcaggccgtattcgagctacattgcaataggccttgcgacttagcgcatcagcgaccacattagctttaccggggtggtaatgaattccaagattgtaatccttgattagttccaaccatcttctctgcctcatatttaactcggtctgagtgaagatgtacttaagacttttgtgatcggtgtatacttcacatctgttcccgattaaatagtgcctccagatcttaagagcatgaaccacggctgccaactcgagatcatgggtgggataattgacttcatgaggcctgagctgcctggatgcataggccacaacctttcattcttgcattaggacacatcctaagccttgtcttgatgcatcacagaagatctcgaaatcttttcggatatctggcaaggtgagaactgggacagtggtcaaccttttcttcatctcttgaaagctgtcttcacaggctgcagaccattgaaatttcttttctttctttaacagctcggtcataggtctggctagcttagagaatccttcaatgaatcttcgataatatccagctaagccaaggaagctgcgaatctctgacacattcttgggcgggttccaagcaagtacagcttcaaccttgctgggatctacctcgacaccattggaggagatcacgtgtccaagaaatgctactcggtctaaccagaattcgcatttcgagaatttagcgaatagttgatgatctctgagcttttccattatcagcctcaggtgttcagcatgttcttcctcattcttggagtatatcaggatgtcatcgatgaacaccacgacaaactggtccaggtattccatgaagattttgttcattaagttcatgaagaacgctggagcattggtgagtccgaaggacatcactgtgaactcatatagaccatagcgcgttgagaaagcggtcttcgggatatcttcagatctgattttcagttggtggtaacctgatctcaagtcaatttttgagaaaactcttgctcctttaagttgatcgaataaatcgtcaatctgtggcaacgggtacttgttctttatagttacttcattcagggctctatagtcgattaccattctcttagagccatcctttttcttaaccagaagcactggggctccccaaggggatgagctaggtcgcacataacctttactctccaattcttcgatttatcttttaacttctgctaactcattagctgccattcggtagggtctttttgcaattggtgcagtgcctggtgccagttctatggcgaactcaatctctcggtctggtggcatactcgttaattcttctggaaatacgtcgggatattcacagactatgggcaccgactccaaggaggtgacttgtaaacaggttaggatagaccgacttgcggtaggggtgttagaggtaaagcggacttgctttcctccaggtccttgcaaggtgatggacttttcggcataatctatctatcctttgtgcttagccaaccaatccatccctaggatgatgtccaagctttgcgagtctaggactatcggtttggctaggaagtcaacttcctcaattctaaggttaacttccgggcatatttgagttgcccttatattccttccaggggaatgtactatcattggtacacgtaaattttggattttccaaccatttcttttcacaaaagcttgtgacatgaaagaatgggaagctcccgaatcaaacagaactattgcgggtacggagttgacagagaacatacccatcacaacgtctggagcatcctgagcggtctcggcttgaatgtggttcacccggcctcgaccaaggttgttggaagcacgagaaccttgtccacttgcctgagagctaggacaagactgagctgccgctggagtaggagttctggcagtgctgccattagcatgccctgagttggtgttggtaggattctgagggcactgtctggcatagtgacccatctggttgcaccggaaacactgaactgctgacggtccctgcggtgacttgaaagaggtaacactgtttggtgcagtattgccactaggggcacgctgctatggctgaggtgccggacggttcatctgaggacgaggggcgtagcctggctggcggttagcctgagtgaccgactggtggtattgcatgggttgaccgtagcgagggcgaggtgcgcctcgggaagaatttccctgatggttagacttgcgtttcttgtattcttcggtagcctcttttctggcatcttcaagtagaagtgccttgttgatcatatgttgaaaagtggggaagtcatgagcaagcaactggagtctcattccaactgcgatccctttcaagaatttcctgatcttcttcttgtctgtgtccacttcctcaggggcgtaccgagccaacttgttgaacatacttaggtactcattgacactgctgttgccttgcttaagtctgttgaattcctctttcttcatgtcaatagtgctttcaggcacatgagctgcacggaaagccgtagcaaactcatcccaagcaatgttagtgggttcagggtgtgcattgcagtaattctcccaccaatctgcagcaggtcctcttagctagtgagaggcgtagagcgtcttctcaacaggagtacactatactaagttgagttttctatcaacatctttcagccaatcgtcagcctcgacgggctcgacagtctgagagaactctggcggacgagacctcagaaaatctgtcagcttggatctattgttgctcatgtgattgtggccatttccatgcgcgttatgctgaaaaccggctacggctgcggctaatccttgcaagatttgtgtctgaactgccattaagtgttgcatgttgttttccacctgaggtggggaagggaggcgttcttctccagaattgtgactggcagtgcggtgagagcggtgagactgttccaactctgcatcacgggaagctgtgcgatgcgagcggttgctgcggcggggttgctcaacttctgcgttgcgggaagtaatacggtgcgaacggttgctgtggtgagaccgctcattagctgactcatgattttcttctggctcaactctaccttcttcaaaaccgaagcgggctggtgcacgagctgcacggcgggggcggctagccatctaaactcccagaagagggcggggtaagagtcagataagcacttaggagggcaaggagcaaagtaaatagcaactcagatagcacacactagacataaactggattttttcaaatcataaaaacacctaatacaacgggtgtggacaagtcacagagctacgccgagcttgactgtgcgcacaccacctaggagaaccagactaccaaacaacacccacaacaaacacacgcacgcactatctcgccacgactccaaaagagttggcggtggaacaaaagggcctaacacacggacggctgctgcagactgcctcctctactcctcgtcggcctggctgcctcctgtagtcggctcctcagtcaaagaaacgtcgatcggctgacgcgaagggaccggcggaacctgtcgagggccggcagcagcacgggccgctggcggtgggggagctgggtagtcgaaacggaacacggtggaagaaccaacaacacgattccgcgcagtgcagataaagcgtgggccacggcgggaggaagcaactggggtgtgtccgggggtgtaggaagggctaactgggtgtgggtagggggagtacactggtgagtacggcgcacgcgagctgggggagcgcgggccactgggggtgcgagcagagccgcgggagctgtgggaggacaggtggctggcatggcagaggcgacctgagtcccaagagacaatgtcaactgaggtgacaccctcctcggccagacgggcctccaaagcggcgtagcggcgggcaagggagcggtaagcctcaaggagtaggtcgtgctgagtggcctgagcctccgaaagcttgaccatgcgagtcagcactggctaagactcgctgtacggacaagggtacctggcgtctgcgtggccagaaggaaggcgtggaagctgccggaaggcagagcccccgagatggtggctgtagtcgtgggccaggcgacgaagcgcagtccaggagaggtcctggtacgcgatctggagagtgggcctggccacagagaagtggtgtgggcgaaggccagctccgtgtatacctccacgagggtaaaggtacacagagagctcacagcgagggggaacacggtccacggagtaccccgtgtactcgggacacgagaagccaaggaagcgggcgaggtcacgaagctgagcgacgtggtgaccctcaccgaaaccgtgggaactgaagctggcgttcactgccatctataattttgaaagagggagaaaagatcagtaaccattttagaaacaaactattgaaaataaggaaaccaaaagaagccttagcttttcgcaagtagttttgaacttagtatccttagggtcgtcctaaacgtcgggtttcgccctagggccaagcctgtgctctgataccatctcttgtcacgccccgaactagtaccgaccggaactagcccgtgacgctccaaattaacctgttaatcgataccagtcctaggaaacagtgctggtatcataggaagacggattatcacagcaacataggtctctttattatagagtagaggtacagtcatgttgggctgcggacagatcccgagctcacaactgcattacaaaagggaaacggaagccaggacttggaccaaacaacacaggcgcgacttgggaactaggccgaaaccctaaaactcatcgtagccggcttgctcctggaagaattcctcatcagcaggatccgcttcatcttcttcagcaactggggggattatttatatagagcaagggtgagtacgggagtactcagcaagccatgggaaataagtgtttaatgcaggcttcaaggaaaggctgttgtttttgcaattgattttatttgaactctcttctgaaaacaactaagtgagtggttctcaaacgacacggatgagacagtgcgtctcgtccggtcggagtatgtgcaatgtatcagtctttagaattgaatcaaggttggcacccggccaacagcttttcaaacagccacccgggccaacaactttcaaacggccacccgggcctagctgatcccatcagctgcagatttttcaaacatcgaacccctttccacaacagcaatttcacaagcagtagtcaaacaaaactacgctaggaatcacctgacatccacccatgaccgtgggcacggctgttcgaacagtttgttaacctctgcagagggggtacactttacccacacgacattactaacccggatcacccagcccgtggggatcagccacgtcgggagacctccaagctttcatgacaaggcattttgaaagccgacacaggtttaccatatgccgacgagaggggtcccagaccaacaacaggttaggtcccagaccatactgtgccaggaagcccaggggtcctccccgacaccaccccggtgaatccacatgtctctcggcatcaaggttcccctgataagctagttactcagccaggggtgtcccattccacccatgtggtcgtacttgtcttatgttcggatgaaattccaaggaaacggtccttaagtgcaagagcggaaaaccgtacacccggtacgttccccggtccgcggttttggaaatttctttagttcgcaagcaccgacccaggtgtcaggttttccaagtcttctgtaaaacccaagttttacccaagttgtttttcagattttaagtttgaaggcgaccgtcggtactcgcacatagtgcacgatttccgaggcgcaactgggtggttacaagggaacatggtataacaattaacaaaggaaggatcaaatgcaacaaactaggtaggtccgccaatctgccttgcagatgggacaaacagattaagtgtgatcctatcaatgcataatatttttcaagcaacataattaaattcaaatataggctcaagatgttcaagggtggcttgccttgctcgagatctggagcttgatcctcgaaatcctcgcactgcgggtcttcgggctccgaaactacacgcgaaaccggacaactcaacaaacggcgaaaataaagccctattaatgacctctaagcatgccattagatagatctcgagatttgaggaattttggaagttgaacggagtcaaatggatttacggttgggaagatattgaatttctaagattattggatttttggtctaaaggaaaaggatttaattagatcctttttgaaaaaagaaaagaaaagaaaagaaaagagggagggaaattagacttttcctcgggcggctagggcgcggcccgagagaaatggggcggtccggccgagctaaatgggccggccggcccaaggcggcccaaggcgcgcgcgcgcgggaggggaggagagacagagccggtggaccgggctcaccacgcgtggtcctgggtgggacccgcttgtcggtgacacggttcaccgtgcggagcgagcacgcggcgcacgagcgcgggcgggggagggatgcgatgcacgcgtgcggttcgcggtggaacggatgcggcgggcccacgcgcagcctcacggctcgcggtggaacgcgcgcacgggaggggctgaccggggtcggcccgacccgatctcggccgagctggcgccgacgtggcgcctacgtggcgcctacgtggctgccacacgggctggcgggaggtagacgacgacgccggccggaacggacggcggacgacagcggcgagcggcggagcgaaccacggtgatacaggcgaaagcgagcacaccgggtggttgttcaggacgaggggagacgagccaacggctcggattcgccggagggagtgcgtcgacggcggaatgcggcggcggcaaccggcggggagggaagagggaaaaggcgacgaggtcacgaggggccgattcccggcggcgagagcaactatgcggctacgggaatccgccccttgctccggattaggaggaaacgcatcgagggaggccggcgacgagaggcgcttccgagctcgggcggcgacggcggcgagcacacggcgagcgacggcaacggtcggggcggcgccggctagctacgggtaggctactcgtgctactacccgagtctaaggggaggagatggattgaggagggagaacggggagatgcactaccgagatgaggcggggtgctgtgacgagaggccgacggcgcgggagtaatctctccggcctcgggccggggaagaggaaggagagggcgcgcccgaagtccccttccgcgtcctcgctcgtgccggctcctccgacatgcgcaacgacgaacggcgacggcaaaacagaggggcggcaacaatggagtggaggcgataggacaacgagaggagaagagagggagggcgcctgggctttaaagggcggcaatgtcggtttggaaaccgactttgggcggtcaaggcgcgagctggcgctccggctagcgaccaaatcggtgacagggcggagggaggatgacgccggcgggaggaaaaagggggaaaaaggagggagagaaagggggcttgccccttgcctctttgggaaaaggaggaggggagcgggggcgacgcggcagagagaggagggggctctgcctccgtcccttggcggcttgcgcgcggagtggcggggccgaggcgatgacgacggcgatgacggcggggcggtgtggagcggagcggcgacacgggcgacaggcgcgggcaggcgcgacagagggtgacggcggcggcgaccaggcggtcggccaccacggcacgcgcgcgcgggttgcaacgggaggcgcggcagtttgagtggcgcggctcgggcacgcgcgctggcttgcggggccgagcggctgcaggcgcggcagggcagctgggccgggcggtgcggacggcgcagacggcgcggctctcgcgcacgcgcgcgcggcgcgcgggcggagcggagggagagggagagagagagagagagggcgccggggagggagggggagatagaccgagagagattcggcccatcgaccctgggggaggcaaaatagacttttgcggaggaatttgatttggaaggatttggattcgggattgaactcgacgatagatcggggatttgagatcttgagatggcacggacactagacaacaagcaaagaagcaaatttcgcaattagggtttttaagagataattttcccgctaggcgccacgacggaacgggcgctacataacagcacatcctccaatagtgaaaacataacatgtgagcgatcttctcctatccaaatctccagcaaaatctgaatccacataaccaacaagttcatctctagatctcccaaactgcaaacaagcactagatgtaccacgtaggtatctgaaaatccattgaacagctttccaatgctctttgccaggattagccatgtatctactgacaacactcaatgcatgtgataagtcaggacgaaaacataccatggcatacataagtgaaccaactgcatttgaataaggaactctagacatgtactcaatatcataatctgattgtggacataaatctgaaatgtgcagctaaaggagtactcactggttttgcatcatgcatattgaaacgacgaagaactttttcaatataacctttctgactaagatataacttgccataatgtctttctctagtaatttccataccgagaattttcttcgctgtacccaaatccttcatctcaaattcactactcaattgtaccttcaactttgctatctctgatttgtcttttgcagcaatcaacatatcatcgacataaagtagcaaatatatagctgaaccatcaacaactttgagataaacacaactatcataattggatcttctaaacttctgagaaagcatgaaagagtcaaatctcttataccattgtctaggtgactgcttcaacccataaagagatttctttaacctataaactaggttctcttttccaggaacaataaaaccttcaggttgctccatataaatgtcctcttctaactccccatgtaaaaatgcagtttcaacatccatttgctctagttcataatcatgcattgcaacaatactgagtaaagtgcgaattgaactatgcttcacaacaggggaaaagacatcattaaaatcaatacctggaatctggctataaccttttgcaactaaccttgctttgtatcttgcctcaccacttggagacataccttcctttcttttgaagatccactttcaatggataggtttcttctcctttggcaatttcaccaattcccaagtatgattcttttcaagtgactccatctcatcatgcatagcagttatccatttattgcaatcatcagaaacaatagcctcagaatatgtagaaggttcggcattaccttcaatttcttctgctacactcaaagcataagtaactatgttcgcttcttcaatatatctttgaggaggtttagtatttcttttgggcttatcttttgcaatagaacgttttggagactgctgaacattagaagaatttgtatcttcaataacaggtgcatcttgattaatagcaacatcttctttttctggtgcatgccctgaactgatcaagtgctccacctgcacatttgctttctcctgactctcaacaggaacattagtagaaggtttgtcatgtaacataactgattcatggaagacaacatttctactaatcacaacctttttggtttcaggacaccataacttatagcctttcacactagacggataaccaagaaaaatgcacttaatagctctaggctccaatttaccattatcaacatgagcataagcaatacaaccaaatacttttaaggctgaataatttgctggggaaccagatcatacctcaattggagtcttcttatcaatggcataactgggtgatcgattgataagataacaagcagtggaaacggcttccgcccaaaactgtttaggcaaacctgcattagacaacatacaacgggccttttatataattgtcttgttcatacgctcagctacgccgttttgttaaggtgtgtgaggaacagtgtagtgacgcacaatgccttcagacttgcaatatgatttaaatatcttagaacagaactccatcccactgtcagtacgaaggattttcacctttctttcagtttgtctttcaaccatagttttccactctttaaacacatcaaaagcttgatatttgcgcttcaagaaataaggccaaacttttcgcgaataatcatcaacgatagtcatcatgtaacgagcacctccaaaagatgtcttacgaccaggcccccataaattagaatgcacataatcaagaataccttcagtagtatgtgtagatgtgttgaacttcaccctcttatgcttgccaaagatgcaatgctcacaaaatttgagcttcccgatgctttgtccatctagcaatcctcgcttgctcaattctgccaaaccaatttcactcatatgcccaagacgcatatgccaaatattagtagcatcggaattagataatgaatcagaaactgcagcaatattacctaatatagttgtacctcacaaatggtacaggttggcagatttaatatcagctttcatcacaacaagagagcatttagttaccttcaaaattccgtctccaccggaatatttgtaccctttacgatcaagagtacataaacagatgagacttctctttaaatttggaatatgccgcacatctgacaaatgttctgatacagccatcaaacatcttgatctgaactgttccaatacctgcaacctcgcatggtgtatcatcacccatcaaaacagtaccaccttgaacagcttcataggtagcaaaccaatccctattcgggcacatgtgataggtgcatgcagtatcaagaatccactggtcactagtttgtgcacagccagcataagcaacaagcaattctgtatcagacttctcatcagtaacaactgcggctttaccttcctcttctttcttaccttttggtatatactttctggttctcttgtctttgtcctgtagcttccaacactcagagatatcatgtccatctctcttgtagtatttgcatgacttatacctgcctctggactttgatctcccacggtagctacttgaacttttgtctcttgatttattgtttgtgttcttctcatgttgcctgccccgaacaaccaagccttctgcttgtgaatttgaaccttcagagggtatcatcttcttcatcttttctttggcatgcaaagcatcataaacttctttcaaaattagagtatcacggctataaagtatagtatccctgaagtttgcatatgagctagacaatgaatacaataaaataaggcttaaatcctcttcatcatactttacctccatagactcaaggtcagcaacaatttccttgaaagcggagagatggtccatcacagacccatcatcttgcaacttgtgcaaaaataacttttgcttcaggtgcatcttactggtcagatccttagtcatgcatatctgttccagcttcaaccacagcccagcggctgtctcctccttaagcacctcctgcaaaatattgttagatagataaagatgaatatatgacatagccttacgatcccttttcttctcatcaccggaccaatcctgtgtcctcttgtcaaatccagaaagcgcatcatcgaggtcttgttgtgcaagaacagctcgcatcttcacttgccaaagtgagaatcttgtgtctcggtccaggagcggtagatcatacttcaaactcgccatgggaattaatcctgaatttgctagtaagaaattagagtaaactagcaaagacgcgaaacctgggtgcacttcctgtgtgcacaaagcgaagtatgtagattttctggtacacaagctttggtgcgcttagcaattttctctggaaaaatcaccaaggacaaagccacacaggggcttcggctgtggctgccctactttttcttccttatccgcgtgcgctgctggcttgctcctcccgcgcggcttctgtactgctgctttgatgcgcgacgagacgatgagacgatgcgcggctgctgcggcttttctcctctgcgccgtgtgccgacgacgtgccgccgtcgccgatagatgagatcgatttcttcgattcgaaaaaacacgccggtggccggggacagtagatcgatctctaaagctctgataccacttgttatgaaaatagatgcacaacggagacacaaattttacgtggaaaacccttgcgggaaaaaaccacgggcgccgaccggcaatgatcactatagaagagttgattacaaacgtaggggaatcacaatgggaacgtctccccttcccgtacggcttacaagagtatatatagaggataaaagaaagacacctaataggaactcctactagaaaactaatctgaatatattatgagcctaaaattcggatcatatatttaacagatttcctggacttcaagcgatcgctacattttcagattgccagccatcgtgagtgttgtgccacggaccggacgccacacctcctattggatgggaaactattctaaattctcgatgggatatccttccgttatttacaatacatgttacttaaatagttataaaagaatttaagaagatatattaatatgtgatatatcactccacaaacatataacttaaaattcaacttcgacacgttgcaacgaaaaaaattaaactacagctaattaatgtatattcacagtcaattttttttatatgtagaaattgaattttaagttgtatgtttgtaaagtgatatatatcacatgttagcatatattctaaatttttttcataagtatttgatcaacatgcaagcaataagaggatattcttttgagagttcaaaaatccactcttctattcgaccatgacacggcttagactcttggccagcgttacccgagttaaggttcatacatttcgagctttcaagcaggtgatcagaaagaaaccgagctatccccgtatggaacatttcaagcaggaacggcaatgttcgtgcatgctaacagagaaaagataggatggcgcgagaatgatgaagatgaagcttagtgcctcgctacccaaaaggcaatattcttctataaggtgatgaagataattccatcactcttacaagctagaaggctctcccccatcccccggcgtcgcccccgcgctggcgaccggggggcgaaagccctagcaccaccgccgccttccctctccccctcccccacctcgccgccgccggagctcgcccgccggctccggagctcgccgccggaaagccggcgggcgagccatgatggcagcggcggggctccctccagggcggcgacccctctcaggcgcggagaggcggcgaacggcggcggttgggggagcgacggcggtggcccatcctggcaaggaggcggcggatccaactccgccttcgccggatctagccatcccctggctggatccagccggagggtgtgtggttggtggcggacgaggccgtggcgctgcggcgcgtcaaggacggcagcaccggcgcaacgaggcggtagcaacggtgcgacgttggcagaggaggcggcggcaacgacgcgccggcgacgatgcttgcacggctgctggcggtggctgccgcggcgaggagatgcgcgcgggcggcagagctcgtgccgccgggccgggcggcagcggggcgagcgacggcggcagcacggcggcgatggcggctcgaggctcgacggtggcggtgccggtggctgccgcggctgtggcccgaggcagccggggcaacacctgtggtggcagtggcggtggctgacggtgtggagcctaaggcctcggagcttggcgcaggtggcgtcagcggctgaccggcgactgctgtggcacggtgggaggaggcacggtggtgtttcagcagcagcggttgcgatggcggtgactgcggtcaccggaggcatggcggtctcggacggctagccgagggcgtggcatacggctgcatctggtcggcgcggcatcgtttggaggaggggtcggagaccggcttggcgcagagtggcgcagccgatggcagtagaggccggctcggcgcgagaggcgcgggcggcggagatggaggccggcttggcgtgagaggcgcagctgatggagggaggccggattggcgcgagaggcgcgtccggtggaggaggccggcttggcgcgagaggcgcggccggcggtggaggaggcaacctcggtgtgagaaggagctgccggtaggtgtggcgcggtcttcagcgcttgaaggctggccggcgggggacgttggtgcaggggtcccacatgtcggcagagcttgagtggtggtagagcatcggtgcgtcagacgtggatttgcaggtggtgagcggtgggtgaaacccagcccggccttggccgggccgacaacgattccctgagggcgttgtcgtgctgtctcaccccccaaggttggttgccgggcgaaagcctagtctttggctcctttgagctccgacgaacggcggcggcggtttttccgtcgtttctcttcttgaagacgccgttttggcgtcccctagggggcgatctcacctgtgtacctttgttggtctagcggcggtcgatcacgcttagcggcggctggtccggtgctagtcttctcctgggttgtgtgttggcgctgttggggtgtgggtggtggtatattttttcctttttcctggttacgaccctccagggttgtaatcttgtaattttttttcctgctctatcaatagaacttcgcaccgtctcgtgcgagtcgttaaaaaaaaaaacaagcggtatagaaagccgtccaattatatgccagtttttagtctcgcaaaaacatcaatgtaacttcatgtggattacttttggctataaaagccggcttgatactgtatcaggacagaggacctttttactagaacagcagtggtcgtacgagtcattttgcatacgtcgagttcactctctgataaggataggcaaggaaatatttctccgtctattctcatctttgtttgtggacttgggtcagtaggtcacaacaatgaggctgtgactacagcgataagttagcagctcatccttttcatcgggtctgtttggtaatggtagagctcaaaacctccaacttccaacttttaactttaacttcaagagttcagtctggaatgaaattgtagaggagtctaaacccacattcacctctctagttcattctgtgagagcgtttcacccacctccgttcccattatagatggagctcaaactgtttggttagcccagctctagaagagatgaagctagagctatgccaaacaagtccatcgatgaagatttaaggccaaaggcaaataatgtatttatctcttccttttaatttgtgctctgatcaagattcatgactgaatctcacacatcctagaggatagagctcgtaaaatgcatccagtatcataagatttacgaatcactggaaacacgacgaaaacatgtagaattcaagaggtattcaaggaaattaatctcgacaatgggccttcattttggtaagaaatggcgcactatgtggtcacacgaacacaagggttaccatgtagtacatttttcccgtggttcttcaaaggaagccagtcatcaaagaattgcacagtataaacacatattagtgatccggtgtgccccacaaataaagaatgactcgtgttaaaaagaatggaagaaataatacattgccaagttgatggaagaattacaacagcagagtacaagaccaagatcaaccgatctgtggtaacaaaatcccacacccacaggctgagcgagcctcagacagatcaatatgccaaaatgatcgtgaaacaactgtagataaactataggagtatatttctatgaacaactgagatcctctggatacacaccattcatgcaaatctctcgtcagctctattcttcgagcccatgcatgccatccccctgaatcaaatggttctcgatgcatcaattccgttgtacttcatacctagcatgaaaatatgatgttggcggatgatgatcaacatgcttaatatttttgccctggaggtgctggtggcaaacggtttggtgtgcgtcggctgccagagttaccaccattcacgtccccattttcatagcgtttgccacggctgtcagcacttcttgaccttgtttcattgtgtgaactggatcgatcaacagagccatttgatgcagaatcgaacgcagacctccagtcctcacctgactggccagaggtccgtgggctactctctgcaaatgatttgttttgtttagtcaggattaagtgcttgatatttcctaccaggtagccaaagaaatatgaacgaaaatacaaaatcattcaccattatatctacgcagtctcaatccatatacagagtcacagatagtagacacttctagaatatgcaggaaaatttaaatgtgaacagcaagtgttctgtcttgctcagttgttattagctagatatcagctaggtcatttatcttgttcagttatcgtcatttctgttaaaatttacaaatcatggttgcagacttgtgccattaaaatttccaataattgcaatgcccaaactatgacaagaatagctggcaaacatgggccatgaatataaaccagattaccaagatgatgttgttacccatgaacctaggccagcattaccctcttatgttttggcaaaatgatgcatgcaatgtcatcatcgacccaaccttaatggcaacagaatagttagataaaaccctcacctagtatgagaacctatcatattgcagtattcaggcttgtttgtgaactaatgagatctgaagttttgaagctgacagtcatgatcatgcaaaacatgaagatgcgtgctaatacccttagcatactatctctaaatttcaaattttgatcttccaaacgaaattgattatgatattgagatatcgaaatttaggttgtataatatagtatcacttcccttgcatatgattttgagcaaatttgtacacaatttgtttggtgatggtttcagtgattgcactaaattggtggtgttctacttaatacttccctagatgaagaggcagcaaagcaaacttgctaagttttagttatcttaattttcatgctaagttgtcatcacacaaattctgctaaagttgaaccatcatatgtactcgtgctgtcctgaagtgcttgttcatgtggcagaacaattatggtcatgatcagatgagttgtaattcaacaaggtttcaaacatggccatcgtagtaaattccattggcttgcagaaaatagactaggaaaactcaatattatgatgggaaaacaaccaattaaagttcagaagaaaagaaaacacacctacaaaagaaatggacaaatttgcaagcacacaaaactattgcatttgctactatcaactaagtatttgaaatgtagccaacttaccagctccagaactatcattggtatacgatgcaacagaagctctattgtcatggatactaagctgacgagtaagctttgacaatagagatgattgtttttggtacttctcccgtctacgtttagcattgtggtcctcttggagaagttcttcaatctttgcattggtttgagcactaatgatgagagttgtaacaagattagcagcaagttacaaaaggaacagaatgactatgaaataaacacttaacatgtatgtggagcgtgtaacagttttattttttcaggtgtgctttacttaatggaatttctaccatttagtgcaccatatgtcatgtatctacttgtgatatgccatgtgaaggaatgtcatgaatagaaataaaaataataaataaaatatgagttatgcgaacaatgttcagtagcgcctgcagacattgcagtaagtcctttaagttgaaaaaggaaaactaagggtatatccatttagtgaaatatctgcaggtgctcaccaaagtctttgtgttggcagttttcacttgttaacaactgatccaagtgttaacagtggcgtgttaacaagagaaaactgagttgaaaaggaaaaaaaaaaagacaatatctatacttaaggtcaatgcagttccatctaggggtatgtccatttagtggagaaaaagaaagaagcgaaaccttatgcaatgcacaaatacaaagaaagaatacgcatcaaaccttattttgctgtagagctgatttagcatatcttcctttgctttctccacttggcaaagtacgattgcctgatcatgaaaaagacaataataacaattgcaactatgaccatgttaaattgagtttaaaaaatagtatgactgttgaaacaattgtgaggttcaaatgtaaacctttggaacatttgctgccaaactgttcaaaacagcctctacataaccacgaacttcttgagacatccaccgaagttcttcttcaggatcagcaggcttccgggccatcgtatccttaagggagagtaattgtgtcacaggcaattcaaaatttgtgtttgacacattcaaaaaataatcatggccgtgggaaagtggaacaggttgatatgagtgttcagttaagatagttgcacaaaacaagtggctttaatttcttagagaaattcaaatgataaacatggtcactggtaaagtagaaaacttgccacaagcatccactgaagagagggtaaaaatagcttaggcaataactcagaattgtagatgttaaaagctttacaatgacaatagcataaaaaatgtcaaataaggaacatacaagggacccatcagaatggctttgcctcatggaaccaccctcaggagtatttaaacccttcacagaaccccctttgctttgaatgacacctcttatcttcttcatccattcaaccttgtcagcaatagtctcggccttcagtataacagcactatgagctgcaacatgaaattcacactttaagcaacataattagcatttaaaacctcagcatataacgtttagagacactaacatttcagcacagttttgtaggcaactctgttagtaatcttaaatacaagacttgggcctttctctgccccattggccttctttgaatccttcaaactcttggaaagctcttcctcttctatctcttccagattacattcctgactcacgcagcaaattgtgttattaagttcatatctcatctctcatagttgtgcacacaacttttttagtttgaatcatcgaatgtgaactggaaccacaaggactgtaaaattacaagtctaaggtgtaaactaaagtatcgtagatcactgttgagcatgaacacagaagtataaaaagttaagtgcacacctccaggacaataacacctcgaaaatgtctctcctcttgtttcttggtgtacccaagctggacatgaaaaaaaaaacagtaaatgacaccaaattcttaactaaataaaggacatttgaaaatcggcagcaaatgacaagattatcataagttattattcagaaaaatcaaatatggggaacaccagtacatcagtgtacgagatatattaacctttccactcttctcatttaggacaaaccatcttttgctccattcattattttttgcacttttcttcaaaaggtagcctgagtagaaaagaagaaatcatcttatatgcaaaaaagccaaaccaggatacagaattaaccaaaaccatctgcagttacttgtaactacaaatgaaagattacactagctgtgaagagccagagtaaataaaaaaaaactacaggaatgataacctatggtgcatcagcgcatcattatacctgcagttatttcaccaccaggcccagcaacctgcaaatttggtccctcttttgcatctttatctttgtcttgctgactgaatttttctttcaacgatttcaaggcaccaccagattgctcagatcctgtgcctgagccctaatacagaaggcaaccaatgttcagggccaaacaaacgcaagaaaaaggaatcttgcagtcattacttttagcatgacctttcagtaagcacatttgtgcaaggtgcaagaggcagaaatcataccttgttggactgttctgcatcttgggctttcttagatgacctgtttttcacctcatcctcacgacgttgcctttccattctgcaatgtcatatcaaaccaaatataaggattgaacaatgctattataaatcatgaaaacatcgtaaaggtctttcagctcatagacagacactagtatggaaacattatccacttcaactaagggatgaaactatatttctctaacaaagaagttgtaatgaagtggtatacttcgtgggcacatcactctgtacagaaaatatgccggccttttttccatttggatttaggcagttgatgctatttctataagactacaagtcaatgttattcttccctatcagcttttgtggtggaaattatttactgaagttacattagagcagattgaaaccaaaccaactgtaaagttattcaattaagagcctgacataccttctttgtactaaacggatgaagtgttgtggtgggacaaaggcacgctccatatcaacaagtgcaactaccatcttttttgcatcacttttgaagacatccaatgcattggttgcaatttcaacgaccttcagaaaagagatgatgggatgttgtgctcaggaagcaggtgaaagggaagtagaatgcattgtaagttggtgaaatagaacaaagtggtacctcgcgtttgaatggaggatatcttccaagtcctggtgtagcatttgcagaagcatttactatgtccaataatacacggtgtacctagtatattgacaaaatgtatttagtttacatattgacactacactggcaagcatagttattagaagcagaccggaccggcggttcacccggaataaaccggaaccaacactcttagcggcctggttcgattaaaagaccagtgcgcaatcggaccggtaaacacctgatcaaactgaacggttctctatcttttgggtcggctataaaccggtgactgcccacgtgggcctgtcaagtggagtggactcgtcagccatgcatgcgagtaacacaaaaattgagggaaaaaagggtgaagactgggattcgaacccgtgaccaagctacaacaccaaaaatactccaccgttgggctatgacagctgttgtgattatagtgcagcatatgtctatttaaaccggatcaaagcggcgatctaaccggttagaccagtaaaccactgaaccgagcccatcagatgttcaatcatcgatctggtcttaataactatgctggcaagtgcctacccatgcacagtaacaaaatgattaattaatgcatcataaacttcattggaagttacaaagtttaaaattagcaggataaatatagccaccaaaatccacttctgacattcatccaaagggtaaaaatgaaattgcatctcaactattcatattttacctttttaagtgagttagtaaattatacatataggggatcaaaaaagacatacctcttcaacacacagccgtgatggctcctttgccatttcaagtactccttttattaaggattttaaacctttctctggagatatcaaatatggttgataaccatcggcttccaggacaatctagaatataaagataacagtaatcatcataagcaaagtgtgcccactctaaaattaattctagaagggcttttgaatttacccttttgacattgttaatatcaaaatgcctgtccaaaggaagctgtttgatcctatctggaaacttcccctcaaagcttgcaacaattttccaaccagaccccttttgattgaataacagccttgtaatcaggtatttcatttggcacatactaattaaggtatatataaagaccatacttgagcttatcactaacctcaccagaagtaacatgggcaagaaacttgtcttcgaattcacggcaaagctccaaagcaacagccctggttccttcagcgcttgataccatctgttctcccaaccttgcaagttcattttgcactatctgagacttcccctgaagcctgcaattgtagcaaggtacatatatcagcaatttaacaagaaattaaaatcaacttattttacagaaggccagagtgtccatgatccattgtgtgatgataacattacattgatagatcaaataagggtcatttatgccgcggaaaagttcatgaactacataaatttaaatttggagtttaaaaggtagtttaagcttgacattttgtagccaagtagaaactgttcacacatcttttatacttggcatttctcttgtcatggacgcatgtgtgttgtaagtatgtagttgcagatgcaaaaagattggccaaatgcacagaagttcagaagaaatgagtagataaccatgtttgacatcatctaaatgtaccaagctaggtcaaataggaaattggagcttggaagtgctgacaaaaaaacaacttgattccacaggtgcataaacacaagagaaggtacaagctccaataatggtactgcggaggggatatctagatacatgaaatatgattgcgacatagaacctggacaatttgtgctacatgcatattgtttacttttaactacaacgatactgtagaagggaaatcttagtgaaatgaaatgtgaaagatgttttgacatccaaattccatgtgaaagatgttttgacatccaaattccaagaccatctaagtttcagttttcttaaaagttggggttgtgcttagtttactttaaaaataaaataaagttcaattatttaggaaaataaaaataataaaaaagggcaatgcacttacccggacaaaaggttaggtagccgaattttcatccttttacgtatctgcttagcaatggtatccacgagagcaattctccctagcttacttcgaggagctccagttaggatggatttgagtgtctccgcttcagcctgccaggcagtttccagtgagttctcagaaccaactgatccagcttgggccgatgcaattgagacagattgccctattagagcaacccactcaatttcagctgctgctcgtggtgcacccttgttagacaagatagcctgaacacaagatacagtttttgcatctgcagatgcttgatcaattttacttaaaacacctattgttctggttcctacaacaagatgaacaaggataaacatcagtttctacttgctacggagagaatggtatgaattgcctattgggcaggattataagaattttataacagaccatctggatcaatatccttcgctagtctgagagctcgagatgatgcaacatcagcagcttgcattgctggtatcacaacaatcaatattgcatcattatgtccagcatattcactgatctgaaatgtggagaaaagtcaatatccaacacttgtgagaagatgcaacaaacatggttcagatacttaagatattcgtgctcttttatgtaataagtgcaagcaactaatatatccatggagggcattcaatgcttctcagtcaaagtgcatgcacaatgtcattactatgatgcttccaaccttttctaaagggaatattttccaccaatacattgattagataataagtttatccaattcataaacacattcatatgttaattatgaggagtctggattattctacatgcggttcaatcatcgttgtgtaattgagcaagaaactgcaaatactcacagttgaatcatccataactcgttggtctatgccaggcaaatcgaccaattttattggaggagctggaaaaaaacaaaagatgctgaagtgagaattcattaccaatataaacttgtgagcctaacggccaaggccagagatgtaaaccatttccatcatctaaaaattaccaatataaacaaagggaagcaaacagaagaaattattgtacatgtagcagtacaatatccaaaattgtgcttattctaagtatggtactcaatcgttgtagtgttgcaaaaacctgagagcacattctaacaactgtatcagaagacactcttgataccgtttttctacaaccacttattgtcttaccatttcagctttctataacacataaaatacacaaggcatcaatgtccgacaattacaggggcagtatgggcagtggcgcaaacattagcacgactcagcacatggcacatgctcactatacatctggcttaccaacattgtgcaatgtaagagtaaaagtgaagcccagcaacaaacctgtacttgtccgcagcttgaggtaaatctcatcgtttcggcctttccctgatccaccggacgcccccttgctcagcctgtcctgcagcgaatggcggagagcacctgcacgccacaacgccaccagaaagggccaccaaactcagcacaccaaccagccggcgcccattgccagatccagctagccaagggaagatctcactcacttgccgacacctgctgcgacttgctgtcgatctgcaggacgatggatttgctgctcagccccggatccctctgcaggtcgaccactatcggcgcccgcgtcgccccgttctcacccgtcggctgcatcaccacacagcaaccaccacccaaagcttcacaaaaaccgaatgccacaaaagcagaagagagagaagcgagctaaacccgaagcacactcaccagcacggggtggccgatgaggctgttgagcacggccgacttgccggcgccctgcacggaacaacaacaagccggatcgagtcagatcgggcggaggagagagggggagctgccgcgggcggcggcggcggcggctccggtggaagcaaaacacttacgacgttgccgagcgcgacggcgttgaggaaggtggaggggcggcgcgggctggcctcgtcggaggggtcgtcgtcggccaggagggaggcggcctggcgcatggactcggcgagctggacgagctcgtccatggcctccatggccgacgacgacatgggcgctgggatctcgaggctggtcgggggtgggagagatctcggggggcgtggtggcgtctggtgtgatgtgatgtggttggggggattcggggagtgcggggaaattggaggcggacttttggaatccgcgaggcgagtcgggggggtgtgtgggtgttggccttgggggtggtgcaaatttgagacggggaggggggaggagggagtcggtcgttgcctccgtgcttttcaagtgacgggaccagtcacccggtgcggtggggggtgcgaacgtttgttcggttcgtccacgtcgggtttggctggctccaattcagatctggcttctgctgcaggctgcagtgctgccgctgcgactgtgggtatgggagtgggtgggcctgagaatgttcagtcatcttgggccttagcttggggccttgggctaggtgtaagctgtccatttgttggtggagcccagtttactactactcgagcacttggcccaggagaacttctttttaagctagcacaatttaaaataaagcgattagcgctcaaactagagtcggtgtttaatttttattaaacaccactttatccttgtagtttagttttttaaagtagagtggtagtctcactcttatcctgaggatttcagaagtgtttgatacaactccaactttatggaagaatttcgaagcataagctatatagaagaaacagacgcatcaaactacatataaatacctacgaatatgtctcttttaacatttgctttcgaagcgacaaaggccggtgatgaattcttaacctcatcaactactgagagattgtttttatttgattgttgtttacgtatttcatatctctaaaaatattttttaaaaaatatatattttttttattcctatgatacaaatcaagtgtaactcaactaattgagtaacttatggtggaacatgtttactcgagttcaagttcaaaatgtaattgcattaacgactaattatttttttcagtgataagcaatgcatccgtcgacaatgagatgaccatggtatttcggaggagctcatagagatagtatgtccattcatgggggtgatgatacgcgtgttgtgagcaagttttattttttaaaaaactagaaaaaatgtccgtgcgttgcaacgggtgaaatttattttaatcttattattatatagtttagttaatgtgaaattcaccatgagaattcgcttggatatatatttttctagaaaaacatgagttgcaattaggagtctgatcagctcaagttagcatgctagtttttttaaaaaagattccttatgcgactcattttgtattttcaaaaacgagcgaacttaaaacccgacacaaatacatatatgtatttccaagagcgaacgaatttaaaacccgactcaaatatagatatgtatttctaaaagcgaacgagcttaaaaaccgatttatacatggatgacgtaccaaagtactaacaaaaacattcttaatttttataataaaaaatagtatggataccgcctcctacagtcctgctagactgtaaaggcgtaaacccactgcgttggcgtattccaaattcccgccccaccgtacggaattacgaaaacaaaaatccgagcatttatgccattatctcgtcttcctccccgcctctcccccccgcgcgagaaccaccacaccctcccgccatgcactgcctcgccccccacttcctcctcttcctcccactctcctccgcctcccgccacgcgctcccccacaccccacccgctcctctcctcctcccctcccacccagcccaagcccaagcccaagcccgcgccggcccgctccgcctcccatccgcgcgctccccttcccgcgccgctgcccccgtctccgacgacgacgaggacgaggaggatgacgaagagatagacatccgcgacgacgcggacgtggacgaggagtacgacgacgacgacgacgaggagctggacgaggagagcggcggtgaggaggaggaggaggaggaaggggatgatggggtggaggagttggaggaggaggagggtgggcgggaggggaccgctgcgcggaggcggcggtcggaggagtacaagtcgcagcgggtggggaagctggtcgccgaggtgcgggagttcggggaggatatcatcgactacaacgagctcgcggggatctacgacttccccattgacaagtttcaggtggagtagtttctaatcctgatgaactaattatgagcgtatagagtgggtaatggctctggattttacgtggtgcgtttgattgcttggggcgctgaaacggttgggatttgagctagcagcgatatgttgctctgtatatgttaagttccgtgtaggtttctcctgtttgaggctacattggagatatctgacgactctgcaacggtgaaatcggattctggccatttcccccgggggggggggggggggctgtctcgtttgagtgatgattggtataagtagttctggtgtatatggtatcgtggaactaacaagtaaagtcatgattcgttgtaaataaattttctgtactggctagtaatccactgtcgtatgcaattgaggtttatctgagtccttgtttgtgcgtttatttagatggtaggattgtggtcgattccttttttctggaatacgcaaaaggattgtggtcgattcctgttatacattgtgtcttatcattggtctggtttgatgatattatttatgagctacttgtaaagctgttttgcacaacagataaaacaaagatttccatgtcttgattattagcgacgctctagtgctctctacttgtagtattctactgctgttgaaatgtttgtgttaaaattgattttaaaaatgttagaatatccattgggtactaaaacaggaagggataaaagggtagctttggttttctgccaacaaatctacctcttcaccattggtaacaggaagacatttggaaaattgatgctaatcttttatgttgcacgaggtcaccggatattgaacagttttttccaaattctagcaacttgctacttgttgtcctgagtgtcacctcatgttgtacaacccactacttttcattttcttacctgtttcctgtcttctctcagcgcttggctatacaagcatttttgagaggctcatctgtcgtagtttctgcacctacaagtagtgggaagacactaattgcagaagctgcagctgttgcaacagtcgctagaggaagacgcctcttctacacaacaccgttaaaggccttatctaatcagaagttccgtgatttccggtaaaatgctacttttgtatgcccctcttttcagttaacgagtaaaatctgtaagatatacttttcatgtcacattagttgtttttatcttaaatagcatgcccatgcccccaatcaatacacaaccttggaagttgctctcctttatacttagcaacattgtggcaaatactgaaatggccaacttaaattttaccatattccttgactgtcataagaagcaaaaaacaggtaaatgtacttaccttttctctttcaaagttacgtgctggacagttgaaagctgaaagtttatgcaatgctggttcactttagcataaacatgattgatttctgttgaacttgtggcaagttggagaacttcagatcagttgtgctgttgtattattagatatttttcctaggtggccagtttctgattagtagatttattttgacacatcgctgctgtaaattatttcaggaatacgtttggtgatcataatgttggtcttcttacaggagattctgctattaacaaagatgctcagatcctgataatgacaacagagattctgcgtaacatgctgtatcaaaggtatttcacagaagaaggatatatagtgtgatttgtgtgtactgctacgagtaattcaccctgcagaatttggcagtctgcctcttccactgtcgctagtgatgcattccgtgacagggactgttcacagtatactataattcaacactatgtatatccatgggcaatgtctcccaagtcatgcatgcgtgtttaagaatatctatgatttttattacagccacctatatagtttcccaaggaagtttttctctgagattcagcctataatggtagttaattacagatcgcaactgatgttgcctgtcctgtttctattgaaagaaaaatgatgtcttgtatttggactgcagtgtcggtatggcagcatcagaaggtagattatttcaagttgatgttattgttttggacgaagtccattacttaagtgacatttcacgtggcactgtttgggaagaaactgtatgctatctcattactctctaattcatcatgtgtgtcatattggtcattttaattaaataaacatttttttatatctttaggtgatatattgtccaaaggaagtccagcttatatgcttatcagccactgttgcaaatcctgatgaattagctggctggattggtcaggtaattgtacttttgacgtctcttttgcatcatcttaattttctttgccgttatgctttctgcaactatgttaataaactgtattgcatttcttttggacttccagcagtatgacagattgacaggtgtaagaatttctctcttcctactttagaattgttgtttggattttcttatacaatgaaataggattaaaatgattaaaataaattatggcgattggtataagaaaacatgctcaaacatgcacatacccatattcatgcatatgttatgaccatctgtgtgctcatccatattcaaagttgtgtacccatacattttggaatccctttatttcttttaagtattggtgctattttgtatgtgcggaactattatgaagtctgttccttcacagatccacggtaaaacagagttggtgacatcacacaaacgaccagttccacttacttggcacttctcaaagaagtttgcacttgtaccacttcttgatgggaaaggaaagaaaatgaataggtttttccttgttcttgttggcaacttggcattatatacttcagatcatttgttaatttatgtgcatagaaatattcattacttattttccatgatggtgcaattgtttttgtgtccatgcacattggttctggtgtacttgggccaaatcatatatatcttttgcattcaatccatacaggaaattgcgaatgtctcacttccagaacctatcttctccaaaaagtgaattctattatgtgaaaggaaagaggaagcttagaacaactaaaaatgaacaaggtaacagaagccccttggacatctcaaaacaggttcagttgtcaaagcatgagctcaccaatatgcgccggtctcaagtatgaaccacaatctcttttaaactctttaagatgtgtatccttgcacaataactttaaattttcacgtggtcatatatatatttttgttaggactaatgattgtcatttcttgtttgccttttgcaatgcaggttccattaatacgtgatactttatcacaactttgggaaaatgacatgcttccagctatttggtttatttttagtagaagagggtgtgatgcagctgttgaatatcttgaagattgtagacttctgcatgattgcgaggctagtgaagttgagctggaacttaagaggttcaggatgcaataccctgatgctatccgggaaagtgctgtgaaaggactcttacgaggagttgctgcccatcatgctggttgcttgccactgtggaaatctttcattgaagaattatttcagcgtggccttgttaaagtagtctttgcaacagaaacccttgcagcagggattaacatgcctgctagaacatctgtgatttcttctctcagcaaaagaattgacgctgggcgccagctcttaaccccaaatgaattattccagatggcaggtcgtgctggacgaagagggattgatacagttgggcattctgttcttgttcagactacttatgaagggcctgaagaatgttgcgatgttatctttgctggacttgagccacttgtttcacaatttactgcatcatatgggatggttttgaatctccttgctgtatgtatcttactttaatgcttcatcatatttttcctgttttgttcattatccctttatctcatgcattaaaatatactatgcagggctcaaaagttactcataatcagaaagaatcggatgatattaaggttaagcgttctggaagaactttagaagaagctcgaaagttagttgagcaaagctttggtaactatgttgggagcaatgtaatggttgctgctaaagaagagcttgaaagaatacagagtgaaatacaatatctctcttcagaaattacagatgaatccattgaccgaaagtgtagggaagaattatctgaggaagactatgctgagatttcccttcttcaaaagaaattgaaggtaatactgatcgctttatctggttataataacccatataatgggtcttagattataactttctcacttaataatgcacaaagatacgtgtcactgaatgttatgacaaggaaacactccttgaatgcatcttttgtttttttcttatttattccatcaatgtataaccacatgggctatcaactcccactgtttcattgcttcattgagcattttatagagaactttcccttggaattcatggcatttcaaacatactctaaacagtaactttgagcagacatacattctcaacttattgtccttgttttaaagataattcttatttcagttttgaaaaatagcctccattgtgacatgcgattttttaacatgctaacactggtgtaaggtttttcttattatgaacttaataaaaagccagtatgcggagttggtaatactaaagacccttgtatttttagctcgtgaaagcttctgggaattggactaaaaatcatgtgcataatagaaatggttttcctaatatgttgatgaatgtgttgcttattatgtatttttacacacttatattatggctactcattaggaagagaagcagatgagaaatgaactgaaaaaaaggatggaactagagagaatggtggcatggaaaactcggttggaagaatttgaaagtggtcaccttcctttcatgtgcttgcagtacaaagacaaagattcagttcagcatactattcctgctgttttcattggaagcctcagttcatttgcggatcaaaagattgtgagcttggtgagtgaatcagctgtatactcttgcatgagcaatgcagaagggaaaagctacacagttacttccttattatttttattctcttcaatatggtggtaactgttaattgattattagatatgataagggactagtactgagtctttgctatttctgtctacaaatttttgctgcatataccctaagaacagaaccacacaagttttcatctctctgtttgtagtactgttccttttccttgttcttattttagatactattgcaggtggaaaatgattctcctgttgctggcaagcagaaagttgacaatgaaggacagcaatattacccatcttattatgtagccttgagttcagacaactcatggtatctattcaccgaaaaatggattaaagctgtttacaagacaggtctacctgctgttccttcagcagagggaggccctctccctagagaaaccctgaagcagctccttttgcgtgaagatatgatgtgggataaaattgcaaaatcagaatatggttctttgttatgcatggatggatctctggacacatggtcgtggagtctcaatgttcccgtgcttaatagcctttcagaagatgatgaggtttgaacttgttccttgttttccctgtgaatttgtcttttgctaggggtgatgtaaattatagttgatacttggtagggttaatgtaaactagatttgatacttcaatggagttttatctgcttgcgttattccaaagaatcaatctttttaactaatacccaacgttgggttcccatttctctctcccgaaaaggaaaaacacaaggtgaacttttctttctgtcgttcttgttctcctgagaattatctctagattctatatggttatctgcagaagaatgacgatttcctgtaagaatttcatgtggcgccatttgttccccactgtgtatattgtttaatacaattgaaattgtctccaaatctgaagttagggattagtgcttgtaacttcttttaattacatttcacaggtagaacgattctcccaggaacatcaagatgctgtagaatgtcataagcaacagagaaagaaagtttcacaattgaagaaaacaatcaggagtactaagggtttcaaagaatttcaaaagatcatcgacatgagaaactttacaaaagaaaagatcgagcgtttggaagctagatctcgtcgtttgactcggcggataagacaaattgaaccaactggttggaaggaatttttgcaggtgagcatgcaacttctttatatgttcgatgaacttttgtagttacatcgttgatgaaacagcgtggtattcattgctcttgaatgaaaatgagttaatttgcctttatttgttccagacatcatgttccttacctaaatatagttttgttgatttttcctctagctaagccatatgaataaacaacaaatttaggcattttataatgtgatgtctcctctgttggtgctcctcctttcccttttctctcaaccatgtccctttggtctgacttatggtgccttggtttcctaaaatcctctcaccagcccagtgcacacaacctaagtaatctatcttacaacacaagtggcacctactatgtgtaatttttttgctgggtttactatgtgtaagttttgatataatatttcgatatttcttcagaaaacatatcgtggttagacaggtgttcgcagtcttttgaatagatgggttatgggtacaattccagattgttatgctattaattatgcctgccattattgaacattttccaacattgagttgtggttctctaaattggcatgcagattagcaaagtcatacaagaggctagagcattagatatcaatactcaggtaatctatccgttgggtgagacggcagcagccatacgaggggaaaacgagctctggcttgccatggttcttaggaacaaggtccttttggatctgaagccttctcaacttgcagcaatatgtggaagtttagtgtcagaagggatcaaacttcgtccctggaaaaacagcaggtatgctactccacagcaccacccgtttcttcattttttatagcttgctatgtttatctgctttcaaattactttcattgtgtttagatctttatacttacccttagtgcagcccaaattggtgaaatgcactcacatatagtaactataaatcatttggaccatatatcccatgtgctgtgctggacagaccagtgcattggctgtctcagatatactttatattaacgtcaatcatgattagtttgtaaattgaactctgaataataatcaatctgcttcaccaataaaaatctatatccaatcatttggtgacatgcactgtggcatattgagcatgtatacatagggtatgtttggtactttggttccgtgccatagccttaccaaattttggcgtgtctgaattttggtgagacaacaaatcaatagactataaacattccaaccacataaatttgttagctccggaaacattcagactttcaccactctaaaaatttaagacggcaaaccaaacatgcttcaacatacttctccctaataaaaaattattgtgtcaaaacttagcatcacaaaaatttggtaaggttgattttgttaccaaatcaaacatgcctatagtgccaatgaataatatttactgaattctcgatttatgaatatatttccatggggaaacactaagatttggaataatgaatatgaactccatggtgtcgttttcttaggggttgttttgttcaatgcttcaacttgccacaccgcactttaggttgccacacgcccacatcttcttagtcttgtgtttggtttattgtcatagttatggcttgccacactttcttagcacctttccctacatgtcatagactccatgctaactatttgtcgccttgaagttatgtatatgaaccatcttctgttgttactggtgttataaactacttagaagagcagagaaactcactcgtcgatctccaagagaagcacagtgtaaaggtttggaagacgatgttcctgttctgtgttctctaatcaataaattcaatccccttcttagttatcaccggtccctccacatacagataccctgcgaaatagatgcccagtttgctgggatggttgaagcctgggcatcagggttgacctggagggagataatgatggactcggcaatggatgatggagatttagcccgtctgctcagacgcacgattgatttactagcccaggtatattatcttgacctgatatttccagtgtactatcagcttgatggcactattatgattagcatgacaatacataacactcgttagtattgttccagattccaaaattgccagatatagatccggttctccaaaagaacgcacaaattgcttgcaacatcatggaccgggtaccgataagtgagcttgctggctgaaagtatgtgaaatctgtaagtaccacattgaatgtgaaatctgtaagtaccacattgaatgtgaaatctgtaagtaccacattgaccatttgttttaggtaggcaattctttgttgtatcatgcacatgcagttatcaaattgacagagatcattttccaagcgattcttgatatccttgtatcaaattttgtacaagtttctaaacaaaaatctatccacgttcttatactacttatatgaagcaatggagaaaataaccaacacaaataatgtattatgtacagtctgcttctaacctatacctccaaaaaacaaccaatgcaaacaatcatcatttacagttacacgtctccattcattctattcctcgtcactacttgaatcagagtctgcattgtccttcataaaatgtgccggcaagttggggaatcttggcatgaccctcttccttttgctatctacctcttccggtggtttctgagccggtgctggtgcgtcatcagctgcccccttggttgtggccgctggggccgccggttgtgatgatgacggtggtggtgttggcttcttttgctgctgcaatttcctcttgatgtctacacatgcctgatcaaccatccccaggaagtccctaactatgatgaacagctggaggggatgtgcattcttgtccttggtggcaccagtatggtaatactccgttgtccgctgcaccagttcaagcactttctcctggtttccttttagttcattcagttcttgttctgcagccttcacaaatcctcgcaaccctcttgcgaatccatcgtccccataggtctccaagagcttcttggtacctgccagccggttgcccagaattgcgcactcgttgacaacagtgtcatagtccaccagtgccgccttcttcacattggcaaactcagtgctgagacctccaacaatcggtagcccgaggttcaggtattcattttgcctctcctcccgtgatggaccctgacttgtggagcttgctgctgggttgccaccatcggtgctcttggcaaggctgccagagcgtcgaagactgtagttgcggttgatggctagacgcttcccctctgaacgcacaacctcctcaatgacaaagtggagcaaggtggtgctcccgtctgtgctcttcacatcagaaagcttgcggagtgcagtaaggttgaaggcctgtgcattaccgcgtgctgtcccagcattcatccgattgcctgccttgagcacagcctcgagcagtttgaagaacagcccctttgtcctcagctcctggcttgccatctcaagagtccggagtgactgcttgagctgtgcaacctcagcagcatagtttgccttgaaaagcagtgcattgacgcgtgcaaatgggctgggcacatcaaggaggagccggagtaggaagaactccgctggagcaagcctgtcagggttcccagagaacttcagaagtgtgttctcctcttccttggagatgttgagccgagacagcttctcaaggacctccgtgctgagctcggtatggccgtttaggagggcgtcaatgatttcctctcgccccacggtgagggaccggaggatgatggaaatgttgtgcgacttgcgtggctcaagcaagaatatttgctctggcgagttcgagcgtccgaggccagctgaggtgctgccaccagaggcatccttggagtctgcaggctttgtcttgcggtttaccgcggcggtgccaaacagtgcctcgatgatgccttcatccaagctagaaacagaacaaaataacttagttagaattgttcagatgagtaaaaagattgagaaacaccggtaatcagttttttcaaacaatagcatcacattcaagccatataaaaaaaagtaaatttacatactgtagtatccattatcaatatgggccatgcctatattcatttggctatgaatcccttatcttttggagggactctcatggcaattggcaggtgattgtccagtggcgcaagcggacaaagacaaagggtgcctgtcttgcctaagttgaatgtgtcctgcgttcacatccttttactgaattcctatcattgttttctaatgaggccaaagtgaattcccgtccccatcaagatttattatagattgaccttgttcacctcatggaatgactaaaccataatttcccagcatgcaccatgatttcgactagaaagtgtctactagagcaattttacctaagaagacatagtagttcaaaagaaaggagtactatgatttaaaaagctaatcttgtagtaccaaacaactatatttgagtatgtcaagcttagaaatgttccttttcctgttcaatgagaaagcatgctacactgctacgccaactcgtatacttgttccacgaaatcccgtgtacccattccccttgcccatgtaagccaaaagaagtcacgcccatcagataaaaccaaaagcagccatccgtccctgtcgcgggctcgtggctttgtatgtaaagcgcccttaatcaacagaaaatcaacagaaaatgtaaagcgcctccagaaagagcatacgcgcacagaaaaggcagcaggatttgggcgcccttccgatgatgctgcgacgacgcgacgtgattccaccgaaaaggcgacatgaaactacgctatactagtctgtgatcccatctaagaatgtgcacctgctttgcacgatctgagatcaaaccttttcatgccaactgcgccattctgcacagtgacaactaaaaatgcaagtgaaatatcctaggtttatgccttggttgatctgtatgacattcctatctgaagtgcaactttgtactctgtatgttcagctgaatagtagagtactctgctcctaccaactaggagtaataaacattcacactagcagtatgcacaagaagcacctaaagataattaacatctgtacctacggcgatagtactatactaccgtattctttcagttcaggagtactaaaaagtacacagaaatgaaaatgagaagaggagcttacttgaatgagccgccggtgatattgtcccacaccatggagtgatcggtggccgccacattgaccttgtcccaatgcagcggcttcagcttcgcctgctgatccgcggaaccggttgggacgcccggcgccgccggcggcctcgacgcgcctcccttcggcggcggtggaggcggcccacctttctttcctcccggaggaggcggcggcggcggggacgggcctttgggcggtggcggcggaggtgggcctttggcaggtggcggcggaggcgggcctttgggaggtggtggcggaggtgcggctttaggcggcggcggtgggggtggcgccgcggctgctggtttgggcggtggcggtggcggcggcgcgggtgacgcgacggcggcggcggcgatagattgcggtcgtgatgggctttcccttccaggcggcagtggcagcgatggagatggtgaggctggtcgggcggcaggggctggtgccggagatggggacgagcggggtaccgagctgacggcggtgatcgccggcgtcgacggtggccgcgcgtacgcctcggcggcggccacagagaaggacgaggtggagccggcgctgggcgcgtacagcgactcgtcaaactcagcggacgcggagtcgagggagcccctcggtatgagcggctcctgatctatcctgttcttcctcgaccgcggcggcgacggagccgacgactcgtgggcatcctgcctcctctccgcgcggtacggccggggcggcggcggctgcggtggacgccggctcgccgggggcttcctccccctcccgccgtcgccctccttctcgaactcccgccagtatatcgcgtcgaggccgttctcgtccaccatgttgccccgcgccggccgcttcggctccctctccggccgcttcccggtgagcgcgccgccctgcgctccaccataatgctgcccggccccgcccgcttcggtgagctccctcttcttcccgtgccggaggaacaggaagaaggcgaggcccgacaccgcgaagctgctcagcgccgtgctcaccacggccacggcgatgtcgctccgcttccccgacgacgacggcggcgacgacgacggggtggccgtaggcgtgccgggggacggagacggcgaggtgatcggcggcggcgtggcgaaggccggcgtccgggtggacgggaacctcgtctggatgttctgcccctgcgccgcggcgagcggggcgacgccgacgaggaggaggaggaggaggaatagggggagaggagtcggagacggagccggagccatcgctgcggcgaaatggaaagtgacggagatgaggcgaggcggtaggattgacttagcggaatcgatgggttgagcttatcgttgagctgggctgcgtcgcgtcgcgtggcgtgcgtttgacctggccgggttgggggttggttgtttacttggtcgggcgccggacgagggaggacggctcatggttgggtacttgggatgggtcgttgggtgggaagagaagagaatggaagggaagggaagggaagacgcgttgttgctgtggaggaaggaaaggagcggagcggaggcgaggcggaaaccgcgcgggcgccgcctccgccgccgcgtgactggggaagggtagctgtcgcatgcattttctccgcttgctttcgttgttggctgcggcctgcggggacgcggaactgacgcggcgggggttccgcgatcggggccgtccgttacatgatccgatggacatggaaaacgcgtaggtccttgtaaaaccctccctacctcaaaaagatctgaaatttaacagggcgaccgggaggttaagctctgagccacagcaacagtaatatcactgtctctgggacgcaagctggactcctgtataggccgagggagagttcatccaaggccacatgttgacagcactagctgtaaccctttgtcttattgtaaagccaggtgttgagtcgatatcgtccggccaggaatcacgtgccagatggacggcggtcgcattgttttgctccgcgcctgcacctatactttaaactggctagcagcgaccagcgacattgagctggtacatcgatcgccggccaaggccaaaaacccaaactccaaaatgtaccgaccgtagccggacgttaccttctccgtggccgtagctgaacccgaatcttttcggtttctgaaacgaacgagctggaagagcggaagaactaatcaggacccgcaccaccaccgccacgccgaaaagttggccgctcgcacttgcttcgctgtgtctccgcgtccgtctccctgttgcgggggacaatggacgactaccagaagaagggacgcgcttgccgaagtgctgcagtggcgtgctcgctccaacggtctacacgcccgccttgctaatgcggtcggtgatcacacgcgcgtcacgtagacgcagacgcgggtggggtactgctaatgcgcagcgatgacccgcactcccctccccctatatccgattcctcctcttctcacctttcctccttcccttcttcccaaaaatttaaaaaaaacaaaagttagaaaaatatatgtatagaaatactatatataaaaaatttgaattgggtatgtaaatttttgacttataaattttggatctataaactttaggggtataaactttagaggtatagaaatactatatatagaaaatatttaaattcaaatttgaatttgaatttgaattagatataatttaaattcaaatttaaaacgggtatataaacttttgacttataaactttaggttataaactttagatgtataaactttagatctataaactttagatgtataaaaatactatatataaaaaaatatttggattcaaattcaaatttgaatcagatatataaacttttgacttataaacttttggtctctaaactttaaatgtgtaaacttgatgtgtataaactttaagtgcataaatttactaaaaaaggaagtaatacggtgccaaaaaaagaaacaaggtggagggagggagggggagccgatcgctagccgaatgcctgggcgatcgatcgctcattagagtttcctctctttgtactgcactataaatttttaaaaaataaaaaaacaaagttagaaaaatttatgtatagaaatactatatataaaaaatatttgaattcaaatttaaatttgaaacgggtatgtaaacttttgatttataaactttgagtctataaagtaatattcgaattcaaattcaaatttgaatcgggtatgtaaacttttgacttataaactttgggtctataaactttaggtgtataaactttagatgtataaaatactatatataaaaaaaatgaattcaaattcaaatttgaatcggatataattcaaattcaaatttgaatcgggtatataaagttttgacttataaactttgggtctataaactttaggtctataaactttaggtgtataaactttatatgtatataaatactatatataaaaaatatttgaattcaaattcaaatttgaatcggatataaaaacttttgatttataaactttgggtctataaactttaaatgtgtaaacttgatgtgtataaactttaagtgtataaatttactaaaataggaaaataatgcgatgcaaaaaaaacgtggaggagagggaaaaccgatcgctcctggcgatcaatcgccaactaggagttggcaacgcacgcggttttcctcgtcatctctagccgcgccggcaccgcgcccccgcgcgcgcatccgacgggccgggcaccgcacgtagcgctggcttccggatcgacccggtcgcgggcgcggacaaggcgagggaaagctgcgtgtggagggggccgcctaatgcgcgggtgatcgcgtaggatcaccgcgcacgatcagtttacattctcatgtgcaacggcttagtttgtttagattggtgtagttagtttcttcttcccgtacacgtgtgtttagattggttttgataacaaaatcaaaaaattagtttgaaagaaaaaaacaaattcaaattcaaatttaaatcgggtatgtaaaattttgacctatgaactttggatctataaactttagatgtataaactttagatgtatatagaaatactatattatcggagatatgggtccgggggtatgtggagtaaaggggaattattttccctccggccacgtgactccacaggttggcccccctcgggctctcccgcggcttcgccccgaggccctcgcccggctgccgcgcggcagagagagagagcaagaagggagcgcaggctgaacagccataaatgtgcgacgccccaactgtccctcaccgcatttaatgtggtcaggacagacgtgcggcgcgcctagctaacccctatccatcgggtatgatcggtctgtgaccggcccgtctccgtcccatccgatggataaggcaatcatgtcctcacgtcgcccttgtccccgacggagtgggggtgggtatgactctacacatccgggcgctactcgaggaagggctgttgcatgtcatcgttcatttataagggaatgacagggctgacccccgtgtcaggcgggggacggcgctgggtttcgcgcaagaatcggttattgtttagcttccgagagaaggcacagtttgaaacccaaaaaggtggagtggggtccccccccaatggagggtaagtagaggtggcatatgtggtatccccttaagctataaaaggaggaccctgcccaccgagaaaaaaaaggagggggggggggccaaaaaaaaaaaagaaaacccgaactccagaagagaggaagcaagtgcgctctctggagaaaagaaacccttgtaaaactcatccataatcccaaacacaggagtagggtgttacgctcgatagcggcccgaacctgtataatccgactacgtgcattcattcttgagagtcgtagggacgagcaagcgactaacgagagacgagcctccgcccccggccgaactcacgaaaggggggtctcacgactccccgctattgagggtcttccctcgacatatataaagaaaatatttgaattcaaattcaaatttgaattggatataattcaaattcaaattttaaacggatatataaacttttgtctaataaactttgggtctataaactttagttgtataaactttagatgtatataaatactatatataaaaaatatttgaattcaaattcaaatttgaatcgaatatataaacttttgacttataaactttaggtctctaaactttatatgtgtaaatttgaggtgacttcaaattcaaatttgaatcggatatataaacttttgacttgtaaactttgggtatataaattttagatgtatataaatactatatataaaaaatatttgaattcaaattcaaatttgaatcggatatataaacttttgacttataaactttaggtctctaaattttatatgtgtaaatttgaggtgaattcaaattcaaatttaaatcggatatataaacttttgacttctctaaattttatatgtgtaaatttaaggtgtacaaactttaggtgcataaaattactaaaataggaaagtaatgcggtgccgaaaaaggaaaattgagggagggggaccgcgcttagcctttccgcgcagacgctaccatcgccgtgacgatatgaaccaacggaatgcatattgtttcttggttttagccaacgttatttactagtatactttatttcccgctagaaaatgactgatcctgtgacttggctttatgacggaaagatacagtaagttactataatcatctaaggtttattatcaactaccatgaaacgagacgagatcaaatgtcaaattgttcgcaataaacacacgtaacatgtgccaatggctgaccacgaaacaggggtaccactggctgtaataatcatcggttggtagctcgtgcaatttgtttgatctccttatcagacagtctagtggctgaattaattttgcgcgtgtgttacatacaggaatgaaaaaaaataaaccaaattacctccattaactatttgctttaattcaaaccatgactttatagaactgaaatggacaccctcaagccactgaaacagtcaacatagctcttttgtcacaggctaccttgtgtttagctgacgtggctgatattatggcatgcgatgggttacctgtccattgtctttcatcctctttgttttagttggatttctggaagagtttttttactgtccagcaggctttggtggtaccaaatgctaaccatcagatgaattggatccaacggctgaaattgatcggtaccacccggtatcgcttagtcgtttgggtggtaccgcacgggtggaagggtaaggtggtcttttcgcatagaaaattttgggaactcgatcggatcgacgtctttcctctccagatggccagatgcgtgccgtcgccgccgttgtgtgaccttggctggccgtcgccgccgtggtgtcgtccccatccgcagatgggccggaccaagacgagaacacatgggggccatcgtcaatggagcagaccaacactctctgggcgatatgcctcagcgagaggtggagggtcgtgcccatgttggcgatggcaaggtcaagctccgtcgaggcagtctccagcttgcaccgtggaggactcctccgcgacggctgccgtctcatgccatcttccgaagcacagggattgcgcagagatttgcagatggcaacataatcctcgggagtattgctcatttcaaatcctaaaaagttaaaagattggaatttttttccctctgactgaaagttttaactttgagcaatgcttctgtccatctatcgagatcagttcttgataaacaataatgtctctttcactctttgtttgagtaccatctttgtactgtacctgtatatctatctgtatatctgtatgtactactatcagttagaaagtccgaaacaatcctcattgtgcatgcatcgaatcaatcctcactggcgaccgcggccggacgacggagcgaaagaagagaacatctctagcgcccctgcctgtccagaagtagttgttgccgtacgcgacacgagcataccggcgtgctgcagcgcctcgacgccggcaggaagcctgcatgggttcttgtgcaacgaagcaggtagaactgatggctaagcactaatacgcacgccgcgaacacgccggagaaacaggggtgctgcgggggcatcgacgggagggaatgaaccggcggcgccagctgcccgtggaatattttacggtggggaggagaagcgtggggggattgcggcgcggatgggtcaagttgcaaagccgggggagattcctattgtgcccttgcacattggacaattagattcaatctggtaccattatgatggtaccagtaccttgaggtacaatttggcggactagagcaaatctttttctggaatggttgtttagcgagtatataattaagtcaacagattctcttttaatcacttcagctgttgatttataaattgtttagattctccttataagcatgtgattggcattgaaattatcgtagtgatagtaatcataagagtattatggtagtacaaaatttgaatcctaaatattcttatattttagaatggatgtagtataagataatctagaaacacacacaatcagattttctttttctcccaatttacatgaaaaaatttaaccttcaagcaaatgtaatggcttgtttttctatttagtaaacgatattttatatataggtttaacttggagcttcagcgttctgaatcactgtatttgttcaagtcaagacctgtagatcaccaaatcttgtcatcatctgtggtagttaaggcctgtaaataaaatccagtcaatggagacgggcacagttcttcatgataagtggagattttttaaggtttatattagtaaatttattatgtttgacattataatggttgacccacatgaagcaaccattcgtcgtttcaactgttttccggtgccatttttttattcttttcccggacggaaaatattgctcagcaaaatttcttagggtgcgttcgttccacggacaatgagatagcacatcgttttccgcgcgcacgcttcccaaactactaaacggtacgttttttgcaaaaattttctataggaaagttgctttaaaaaatcatattaatccatttttgcaatttaaaatagttaatactcaattaatcacatgctaatggctcacctcattttgcgtatcttcccaatcttctcaatcccctattcctcaaactcgcctttataaaaggtgtagatagagtgccaaacctgtagccaacagctactcaattgaaatatttgttatgatcccgcaaaaagaaaaaataaatatttgttatggtgactatatggatttgtttggcacatctctagctccaacttcacctctcttcgagccgaaactcagccaaatagtttcagctctatttaaaaaggaaatgaaacagactgaagtgtttttacacaaaatgaactagagatgtggtgttgggtttagactattccacaactttacttcgtaaccacctcctacaggtaaatttatgagttgaaaccctatgaaatagaccctgtatactcaaccttaagcatctttctctaaaacttctgaacttcagttgttaaaaaatagttggacgaacgcaatattttcgttttattttcagattgtttttggacgtagggccagatcaagcatttgtgctacaagtacaaactctcatatgaatgcatttgttctttgcaatttaataccaggtctcacatggatgcacatttatgggagtcataccgtttcttcatcacatatatagtgacagaatacctaccgtatacatgctattcgcatgagcaataataccattatatacctgtgccttttggtcatggaaacgagtaatatttggcaatttgcaccatactcttttatctacaaatggcaaatcgccttgcctttctctgacctaggcaaagtgctatgaagaaattaatcaagaaatggcccatgtgatgccgagctaccggcgccgaatcccaaattaatgtggtttttggctgtctacgtcaacaagcctgagatttttaatcctaccttttcattcctcgttcccttttcccgttgattcgtaactaaattaggtcattaacaactggtgtgatttgtgggtgttcgccggactatctggtcatttggttgcttttgaacgtggtacaatactagaagcataggaccgaattacagggtggttcaaattggacttaaactgattctataaaaagttatcaggttcaaagcacgtttttgcatgggatcaatcaggttggaaccaactgcaatgtgactgtgactgaatactattatcttcatgacgtaacagcgacactgctaactcaccaagctcagatttgtctcagctgcaccggacaaggaaatttaaggagaagggtaacaacgaaagtgatacgaagttgaagacgttttgcccgtatctagctagaatctctcgtctctctgcgcgttgaaacttcaaacaacggtaaattttggaggtgttcttaggatcgttatctcctacagcttcccctgtacaatctaagctgacttgacccacggcggcttctgcagatttggtcttaatttggttctgatcaaccaagatctggggactattagacctacatatcactatatggcagattggcagtgatagcaactagtagtcagtaacagctaacaacaacacaagttatgtgatgatgggatattaagaggattagtcattaatacagtatcatgcagaagaagagcagaaggtcctccagtgctatcaacgcgtcagattagcagttcagatttcagaacaacacatgaaaacaagtgcaatcaatttcccaccccaattctattgcctcgatattgacttgacaccaaattctattgccggagttcgctgaaccggaagagagaccttgccgttgtccggcgtctatcgtttcccagagaaacgccggcctctgcctccaccgtgacgagctctgtcggccgccggccatggggaaaaagccggttaatagaagtccaaaggtaaaaaattctgcgacaaatgggccggtttaaccaatgggcctactcttcatggaagcccataggccttagctgctcgtgcttatgcactgatcatgatggaccttgggctaaaaacacaagctaaatttgacaaaattatgaatttcctgattccattttcacgaactgatgccttcctattgaattttcaccctcagcaaaggacacatcatacttatgtagtatcggcatttgtgcgttgcaaagtgtcaagtgctaaattacaaatgttcaaattcatcatgtctactcatcaattgtgtttcaggccactcatctgtcaataattcttgtgggaaaattcggtccatcaaatccaaaccccatatgtggctgggcttcaggaagcttttgcctagagctagttgggcctgaccatggcaacgagctactcccagtctcccggacaagtaaactgcaaaatcacaattcacaagtcaaatgatcaaacatatcttttaaaaaaaaagaagcttctttcttgtatacagtacatatagctttagcctttctgtccaagcagttcacttgctttctccaccagcaggtaaagaatgctgtacttagttggatctgatgccctgttcttagagtaggcttgtcaccttcccttccatctgggtttcactctcaccaagccatgatccaattctttactgatgctacctagccatctatagttctacatatatatatatatatatatatatatatatatatatatatatatatatatatatacacgactttattctcaaatttgtcttggtttgattctttctgcaggaccagtcttgcaacgtgaggtttgcatctgtgacaattccataaacttaggagacaagcaagggtgtgtcccggcctctaccccaagtatccgatgccttggagtagactatactttgctcatgagtgtgatttctagtccttttcagtgactaaatgtaccaggcattagacaattagtacttaaacctaatgacaaatctcgttacagttagattatcatcaatgcttggtgagatttctgaatccgaaatcttgacttgctcctgaatcatgacaggaattgtctttctgaatttcgaatacaattcaacgaaaagcatgcatgatcgtacaaatctgtgttccatggtctgtgtctgggtttgatgagcttagcaaggcaacagtaccggactatctatctctttcttgtgctgagtttttgcaacagaaactcaccaaatttgtcctgcatttttgtgaaaggcttaagactagccttgtctctgcagtctgcactgcatttcttctttagaacagtgattgtagtttggtgcaacgaacacttgcaaagagccaaggacagctctgtagtctgtactactactaaccccctgcatcctcctttcgatattcctttctcagggagttagttacctgcacgcatttaggtgagcaacccagttgtaagattcctgttcgttgcttaaccaaatccgttaattaaccaatgcctctcaatccaatctagtgacacacacaacaaatcattacgagatattctttaccttggacaacccggctaatctgttcttgtcctctttaattaacaagtcaagaacaggtcgttgggagctgttcagtagcatgctcctagtgacagccgtacggttcaggtacaaagtgtacaaggcttctagatgactagagccgcgccaaaatccaaatgtgcaacctagctagtattaccggctttaatcacctgtgtgacactgattagtcagctgtaatgagcttgataagcttacactaactagctagactcaatgtcattgtcatactccctttccctgctttgctgatgactgacgccattataatgatgttacttaacgtcgccaaatacaaaggatggacatagataatagcagcagctttggtggccacggaggcccaattgttggcggtggttggtttttaggtggtttgatgagtttgttatgctcttaaactcatccagtgctgtactttttaacaggggaaaagatggctacctgtctcgctacagtttggccccttttgctgctaacactagcacctctcatggtctcactctaatctgcatgatcatttcgttttatgtgcagacaaaatacccgattcttttcagattatttaactggattattagaatggattaattgctgtacgcttcaaaaagtaagttttttttcaaaatctttttttctaatgtattgtttggattacttgttttaaatatatgttaagtttattcatctatatttaatttatcccaataattaagtagataatccataacaataatttaaattaaatagcgtcgttcgggcctaacgcctttcggttcggtgaatgtgctacgctcaaaatgacacctgctccaagcagcgccaagcttcaaacattcaggccagtttctggcttaaaatcgatctggtcgtcgctgcacgtcgtgaattcatagagagatcaaccaggaaagctgaatccaaccacatgaaatgatgaattcgcctcgtgtctgaactctgaagcttcgcgtttctgaaaccgatcggtggccgacagtttcggcaacagacgaacctgcagctacagcatagcttccaggagggttggctgcttaggctttggtcgtctggaatgcatgatccaggaagcaaccgtgaccgtccgatggagatccaacgacgctggggtggttcgttgggcagtggccatcactggagccaactaaaaactcgtgttttttcttttgctgggctcggggtttacgggtatgaagcatgtgaaaggaattgaatacgatttggagtgtagggtggttgatgacaagtaggtgaagttcatcacactcacaggattgagagaggggcagagaatgcaagaacaatcatgggctccatgcacttgccttgcattttccaattctccagctggtcattggcagcctccaggctggggagttgtgggtcgtagcgtataaacccttgcgttgcgccatcatcaagcaacgtggcagcatctcctgcaatgtctccctatctctcagccgtccgatcacgaaattgacgatcgacattttagtaggaaaactttttttttaaaaaagatatggggtgatgtcaaccatctagcttgtgatgtcaaggtttttgctgttcttggtgcttgtggggtaaaggggacttctatgcattattcaagtgcaggcatatttgggaacataaatagcaaaatggctagtatcttctagaggttaagaaaaggcatgcttacaagttgtaaagttgtataatagggaaaggtaggaaatgtgctgaactgctgatggtggacgttttatgtggtgtggaggatgcccatatgcgagaagtctaaagctgctttcagaattattagcagaacatgttcttgaagattgacagtgtatgctatgcagctatctcagtcatcaatcatcacagaacaatataattgagatgctgttgctgctacaatttcagagaacagccttttgttatttccatggttgtcaaaagtttgaactgaagaaaatttcctgctttgctctgcgtgaactgtactgggaatttttaaactgaagtgaactgtattactgattttgtggagatttaggtgggttagttgggggattagtacaataaattttgaatattagttagtctgttgagaggtccctatcttctgcttcgactttctgatataaaagttcatcttaacaaactatattattatttgtttcattggctgtctttgcagctgtatgtgcgcaatccatctgtaaagatcctctaatagtataatgctcttgctccacttgaaatgctctttgctacgtgtatgcgaagaaacacaaggcaccaactcacaagtcagaacatacaagtcatctcactgcttcagactttcagagaaacaaaaacttccagaacacaggaaacaagcttgaaatccaaacagaagctcagagcatacagccaggggaaaacataccagcataccagcaggtagcagcagcaatttctgacagtgcaaaaactacagaatcagcagtacattaggccattctggattaacagagtcagcagaaagggtaaatcatgcagattagaccattgtgtatgaataacagtaagaaaaagaaacatagcagcagcaaaagattgaaccattgtggatcaacataactggcaaaacacagactgcaagagattgaggcattgagccattctggtcttcaggatgagctatagatgcaacattgtttcagctcagacacaaggatgggatcaactcattttgattcaaatcaattcaatcaatattatgcgagttcagcgaacaaacatgtggattctgaactaatagacaaaaaaatgaaacctttatcctatccaagaattgtacaccaccaatcaagtaattccatccccccaaagtcagccacctccaaaccgaagcctaacgaatcaatctgaattgtaccacaaatgaacaagaatttgcttcctctattctccatcttccctttgtgcgccaccgcagtgtgccgcccctccccttcactgtcctgtacagccgaaggcggcagctggcttgtggtggcagctgtgatggctgtggcaatgaattgcaaagcaattccatcaccacacacagctccacaaggcaacctcaatgaaagaattattgtgtatactcattagctgtctaccaagaaaatgccgccgcaggcaatgccgatgatgacaatgcgaacggtgctgatgctgaagatgaatcaccctctgcaatgtagaggtcgtatgatttccaagtgtggtcgagcgggcaaggcttgccggcgtcgagccggtcccatggcttgcccttcccggaccagtgcatgaggctgacagggcccttgtggagagggcggcagctgccgaggacgttgtcgccgcccaatccgtgctggttccagcggtggtcgacggcctccacctcgccggcgaacaccagcaagaacgggggcagcgaccctagctcgtagattcgcttctccttctgcagctccatccacacctcgatgcggcgacggtagttgccgacgcgccaccgccggaggtcgatgaccatgacgccggtgttgaagtagcagggcgcgcggcgtcgcccggcgaagacgcggtcgccgagctgcgggtcggaccagaaggtctcggtgaagtagcgggagaagttggcgtggcagtactcgggcgcggccacgacggcggcggcgggcaggcgcgtctcccagaggcgcctcacgtcgtcgacggcgagcacgtcggagtcgaggtatatcgcccgcgggacgcacttggggagcaggtcggcgaggtagttcctggcgtagttgagcggcgcctcgagagcggcgcgcacggacgccgagatgagcccggtgaccgcgtcagcgcggaacgggtagatctcgaaccgaagcgacgggaacgacgccgccacggcggtcctcagctccccgaccccacccccgcacccctcgccgccgtccgccgccgccaggaagtggaagaatatcgactccgggcacgacgcgtgcttgagcagcgagtagatggccgccatggaccccctcaggtagtgcgcgtcgagcgtcatcgcgatgtggaccagccccgggtcgcacacccccgcccccgccaccgccgccgggcacccctccccgttcctgtactccggcgcctccgcgaacctcggcaacgccgcgcccacatcccccaccaccaccgccaccaccaccaccaccaacgccaatccggcccgcatcgccggattgccccccatatccggcgcctccggcctcgattccctcctcctcctcccaccctcgggggggttggggtgggttcttggaggtcggcgtccccttcttcctcgtcgcgcttgtatgtgcgggggtgggtggcgagcgaggcggaggcgaggcgagggcgagggcggaggcgatcgaatccgccgggtttgttttttcgggggggagatttatacatgtggctttaccaataaaaccaccgtgtttttttagaatatgcgggtcccgcgtcgtcgccttcgctttgcttacgcgttaatctcccctgcaacgcgaccgcgaccgaccgagagccggggttggttcgttagggctaaaatggatcggcgttactgcttcacaagctctcttttcttttttctgggagatactcggcaacgcacacaccacgtactctctctccctcgctctttctagtttcataatttctaacgatttagataacgatgacatatatcttcaaaatatattttgactatacagtcataaaatataagcatttttaagcatagtaaaaagtcaaacatttttaacttttgactattaataacaagaaaaataaaaaaatcaattatataaaattaatgttagtagatttatcattaaacaaactatcataatatgtatctttttttatttaaaacatcttgcttttatatatattgttaatcaaagtagcatctcggagaccgtgtcagagtccaaaaatacttatattttgggacggagggagtacacaataaataaatattttttcgtctaaaaaataagtgtacttctatagtttcaacttcaaattaaactagagatgtgcatttattttaggacgaaggaaatatatttttagttttattctactacttttaaactaatattttaaaatttattaataatagaagttataaatgttaatcttaatttcgtttgaaacgtcaaaaattacggaagccgagtatctcggcttcggctgtcttcttgtagcagtagcaacgcgaagcaacagcgaccacggctgatcacatgtgggcgcgcccgtgacagtgttaatgcattcatcagagttggcaagtggacgccgcaagcttcgcattaggatcaggggataaaaaaaaaagagtatatgcgtttggatgattacagtgttaatcatgatcatgctacgaatagtcatatgacagctacgagacacattcggtgaattataaatacccgtgcaagcaggggattgcaatgtttaattgtgttacaaatatagccattatgatatatattttttgcagtgttaatgaatcttcatttatgtcttgatatttgtgtcattttggtgaggcctaagctaagttattggtgtacattcatgtgcgaccaaaataaattgtgaagagaaattttcttcgcgggaacatacaaatcggagaaatttgtcaaagctttcaagctgacgatggtacgaattgtccctatgtggtcctctacgatcgtacacgcaaatccctccaaatttcaccgatatattggtactagacgacatcttttcacggtatatatataacaaaaatgattttgaccacctttataccaacatcaggtagaagtataatgttacatactccctcctccctccgtcccgaaaaaaacgaatgaaagactggatgtgatatattctagtacaataaatctggatagaggtatatccagattcatagtactaggatgtgtctatgttggttttttatgggacggagggagtacacgcgctatgattctagtagttaaggctcactattacagaattgcatgttctttctaaaaaaattcataggcattttagtaaaaaaaacagaattaaggggatgttgacgtaaaacacaaggcctgggagatctgcttaactccagtgtaggtccaaagctcaccttcgggtgtgttagcgtgccagttgatttgatcctgcaatcaacaaaaaatagaaacaaagagatcgcggtttaatctataaatgatagccgatcggctaagtgccgatgacatatcatttatctttgagccgatgtcatatgtgaatcgatcggcgactataaatagataataaaaaactaaacctactcgatcggctgtagatattaccaatatatagttcttatatcgatatatatttaaatcaagtgattgggatagatcggtcgccatgccgagacagtataaatcacttggatcgaaatatatattaataacaggactatatatgtttatagcatagccgatcatatagatctagcatgtattggctaatactccgatactactctatataagaatattaaaacaagtataatatatcaaacaaaagcttaatatacttaaatgcaataagatcttgacataaagggcggatttaacatgtcactgaagcatatagagcgaatatagttaaatcagataagatcggctgaaactccgatactaccctaatcggcaaccagaaggcaggctagagattgatattctaagcacgacttaatagatcaaactcaactgatgcggcattaagtatgaaaagaagaataatatctagacaatcaagccgctgaaagtttcatagagtggtggatatcttatataatctaaatcaacatcaaaatctaacctaatcggctgccctctactaacaaatgttagccgattgtaggttagatagtgatattgccagagattatgtacgatatatgataactcgatgaattacgtaaacaagattagagtatcataaagatggaagcactaatcccgataacacaagccatcataacaagttttacctcttgttgaagatcgaaaccgatgcagctcaacccgaaagcaagaactcgtcgaaataaaactaaagcaaaaaggtggcgatgcgcggaaattgtattgaacgtgtgtgtttttaattacatagggctcggagtctatttatacccgaaaattacaagatatgtccataccgaacacgactattatctctaacaaactctaagataccacaagtgtttacggcagacttttgcccaagcatatctctaaggaaattacataaaatgtcctaattaatagatacaattgccttcccaggactctatccatacgtggcaatcttcttgaagcacctcaacccaacccgatgtcgtacaccaagtcgtattgttggaatcggctgcatcacctaaccaagtctgactccaactcagccgatccaatcgtacccgatccggacttcagccgattcttactttgtttccgcgacaatcttcatcttcgaccccgcttcaatctaatcttcatctctgatactgatattaccaaatttggtcgttaacacatgccccccaagtccggaatattcggtaatgtttcggatttgccgcatatcgcctccgagcaagtttcgtactccgccgttttccgaccgttatcctcagtgctttaaatactaaccgccgtcctgaaaaatctttatcccgttacttccgttttcaccgccgaagccaaccttgtcctcttcttctccggcgatttctccgacgcacaaggcgatccccaggcgacttcatctccggccagatctccacccgcgacgatgtcttcttccgccagcccgtctgccgcgccgtcagctgagtacgctgaggtaagttcccatcggctagatcccctttctcagcatcgaaccgatcttacaacacctcatcttgttttccccttcttggttcttttgaatctgcagcatctttccaacctagttgcaattcccaacctgtcgcacgaaaattacttctcgtccaagttggcaaccctaatcccaccgagttcgttattggcgaaccaataggattcctttcagactgaccaacccagatttaggtcactggagaaacactttcaaatcctggccatctctcgagaaaacctcacccgagaaaacttggatcacatggttcaagcgcatgtcggctagcaaaagagttcattgggatgaaatcggaatcggccaagcacttgatctcaccatagccaactcagctaaagacgagcccttaatggcagctgcctcctatttttggtccaataccatcaatgccttcttgttcaatcaagggccgatgattccaactctcatagatatcataatgattacgggtctggacgtcacctcatcggctaaccctatgagcttgaaaacgaagaaccaatatgacttcaggaccaagagcataggcggctggtcaggctatgtagcagcatatatgggccaaggttttgtcactcctcgagaacatgtagcttttctgctaatgcggctagaaaaattcctcttttgtggatcaagctgtgggcctacaaccaactggcagttcgtagccgaagccttggagacaaagagacaatttcctctaggcaaaatcctcctcggctatttgtaccaaatgctacacaatacatcggctaagctggccgtcggctcagtagtcggagcaggtggaccatggtggctattgcaatcttggttgaatctagtagttatgaagtttgtcaatcggccatatgtaacagaagccgaattcccaagactggaaccgactgtagatgatgaagaagaagaacgcactcatcgtaggtgcacatcttacggagaatatgcctccacaccagccgatgcaggagcaaagctatcggccgagctgctcaaggactggttctgcagtttttatgagggtttccaaaaagatactcgagtttggttcctctacgaagattcaatacttctggagaatccattggactttaggtttgaagatatcaatcacgaaagatatcaaaaacccagagaaatcttctcagctgcaatcagtccatgtatcctcactgttggcattcatcaaggaagaaacatccaggtttcttatgagttttatcacccaatgagctcagccagacaactaggaatgggccaactcccaattggcttattctttgccgataagatccagtgccgaggggaaatttcatcaaccttaatgatggatcggctgcttaatctccaggaccccctctaggcagcattgacaatataaagctggcagccttcaggagcaaagcatttaacagatggtggggtgaatggaaactgcacctattccatcaatcggcttctatgtatatgacagacctctttccagatgttgtccctcaggcatgtcttgatttacttaatttcatttgaataattgtttagccgactaatcttgactaattttccttttaatttgtagacaacagagttctctcctcctcgccagagcaatagtggcagaaatattgagtatgccctagggctgattccaaacgagggtggaccatctcctcctgttattggctataatgcccccaggacttcaactctccttcaagggctcatcagagaaccagccgacgccggcaagaagagaaaaactaggtcatcggctatagatgcatcggcttaggcaccaaagaagaaagccaagccgaagaaaaccaagctagctgatgatctacctgtcctagatccatccattgaacaagctctggatgaagaagagatcgaagaagatgttgatcaagctgcagccgaggtgagtgacacagaaagaactctattggcttctcccaagcgaactcctccaactccttctgatccagctcacttttcaagggtaaaccacttacattgatcccctctagcagtcatgttcattcatagccgatcactcattgatcttgcatttgcagaaaaagaagactactgtgaggaagaaattggctgcaacaacctttaaaccagcctcaccagtaaaattatcatataaatccttttcttatggccaaccttccataatactttattcttttgcagccacctcctccctcttcatctcctgtgcagcgaatatcaagtgatcgtactccatcggctgtaaagatgcacttaaaccccctagtgggttttggtgattaatgacaaggtggttaaaggggactaacgtgtttatcaagtttattcacaggagtttagtcccaaagctagttttgatggttaagaatgcaaggagaccccccaattcgaatgttcctaagtgcaaaaattatcgaaggtgattagactaggtttttctcttttgaaattgagtttaggaaaaaccgtactattaagaggggtttcaagtgtggttctagggtatacaaagtgctcttagtcttatccatgagtcaaaagatttttggaatcatttttgaaaaatgattttctccccgggacagagagggctacccagaggttctggccggaacttccgtgcaccgtttatttgtaaaaaaattcctaaatgctgcccggaagttcctggcacttttgcccggaacctcctggcaggtttccagttcaaacttgtgagtaatggctagatgacgtcacctagccgttatatatatgaatttcgtccccaggtcaccttttggccattccacttctgttcattcatgttctagggttttctagccactcccaagcttcctttgctttctccactcaaatctagagcctatcttgtaagattgtgagattagatgagagtgtaggagtgttttggagatggcttgaagattaggtttgactgagcactttggatatcttgtgggctgtcacttgggcttattactcttggagatcttctcctagacggttaggtgttgcccgtgacttccaaatatcttgtggatatcccgggaaagtttgtgaaggttttcctcacctccgcaaggaaatgaggtaagtgagtaaagattcttgtgctgagttttcagaggttatcctaggtagagcaacttgcacttgtggtcttttctagaagaaattttgagttggatcttggtggtcactcaattctagaaaatgacctagaagtgttgagttgaaggctgtggacctcttctgggatctttgcataagtaaggcaaggggttaatcaagacccggctctttggagcaccttaacggagagtaggattcgtgtgatccgaacttcgggaaaaaaatcgtgtttgtctctcttgtgcatgatctttgtgtgaatctgttgatattctgcgatcttcatcttgttcctctgtgtgcctaaacttctcttgctaggacctgtttttcatctcagtttaaatttatctcagctgcccggaagttcctggctcaagaactccggaagttccgggctactcttcctgcccggaagttccagtgtttatcaccgggaggttccgggccctgttaatttaactgctgcaattgttaagaaaatttcaggaaagcctattcaccccccctctaggctacatctctgcacgttcaggctgcagatagtcacaatgttgaggaagaagaacaacctgttgttcctaacatcccagtaagtgtcaccttcaaaaggttttcaatcggttgtaccgtgcaatctgatctataattgtcttcaattttctcttctacaggtcttagccgatctgttctcatttgatatcaaaaactatcttgatgaagaaacagaaactgataccaccagcaaagctctagctcccttgtctgatgatgtgaaaaaaactcttgaggatatctctcatcggctagaggcatcattagacaacttggtgactaactgtggttttatcagggcaaggtttgcagatatccaagctctactcccagatgagctagccgatgccctcactccagctgtctaccttgaacaacaccgattcaagctggagatggccaagcagagattagccgatcatcgggagcgaaaagacatcgaggccacaatccaggcaaatcgacagcttgttcatgaagagaaggccaagcttgatctgttatctgacggcccgatcaaagccaatattgatcggctcgaagctcgcaagatttagctcttggcacaacttcaagaatgcaacaccgagctggatctggaacacaagaagctagccaatctcccacaagttgtcgaaggactttggggtgaacacccatccgaaaaagtagggacaatagttcagcatttaggccgtaacatttagcaaaaaactaatcgcagaaggcaagactaaaatcagctatcaagaatgtcgctgatctgaccaagtctctgaaagttatccctggaaccgacgcttaagatgctcaagccattgaagaagtggaacaaattaggcgaagagctatattggctatccgatactactctatatcaggatattaaaacaagtataatatatcaaaaaaaagcttaatatacttaaatgcaataagatcttgacataaagggcggatttaacatgtcactgaagcatatagagcgaatatggttaaatcagataagatcggctgaaactccgatactaccctaatcagcaaccagaaggcaggctagagattgatattctaagcatgacttaatagatcaaactcaactgatgcagcatcaagtatgaaaagaagaacaatatctagacaatcaagccgctggaagtttcatagagtggtggatatcttatataatctaaatcaacatcaaaatctaacctaattggctaccctctactaacagatgttagccgattgtaggttagatagtgatattgccagagattatgtatgatatatgataactcgacgaattacgtaaacaagattagagtatcataaagatgaaagcactaatcccgataacacaagccatcataacaagttttacctcttgttgaagatcgaaaccgatgcagctcaacccgaaagcaagaactcgtcgaaataaaactaaagcaaaaaggtggcgatgcgcggaaattgtattgaacgtgtgtgttcttaattacatagggctcggtgtctatttatacccgaaaattacaagatatgtccataccgaacacgactattatctctaacaaactctaagataccacaagtgtttacggcagacttttgcccaagcatatctctaaggaaattatataaaatgtcctaattaatagatacaattgccttcccaggactctatccatacgtggcaatcatcttgaagcacctcaacccaacccgatgtcgtacaccaagtcgtattgttggaatcggctgcatcacctaaccaagtctgactccaactcagccgatccaatcgtagccgatccggatttcagccgattcttactctgtttccgcgacaatcttcatcttcgaccccgcttcaatctaatcttcatctccgatactgatattaccaaatttggtcgttaacaggggaatacatcctagtacatacattgccaaatagaccaaaagcatcgagccatcctcaacaaaagagaggctaactgaattaaggaaatttacttcctaatgaatatcctaatccttatgcctctattggcatacacatctcttgacataccggtagaaccctttggctccctccacagaaataacacaattcacttagtggtcacttgaaattgagagattatttccattggagaaaatcaggctaacaatatcgtgaagaacatatcactaacatgtactaaggaaaatctataatatccctcatgagttataaggagaatatttttactaatatagcttatgagccaaagactcgtgaccaaatgaagggaaattagcttttatggaatactttatacttctactgttaggccatgtttctttttctgattttggatttttcctttccacgcttcctaatgtaagatcaacgtgtgttttgattcttattctgtgatgaacaattggcatatgtgattatcaattttgatatttggagattatcgtcgaagtggttttggagataatcaatttttaggagatgaacagggtttactggtttgtcgggaccggttagaccgggcggtggttgccgttcagaccggcactatgtgagcggtcagaccggccggcccgcggtctgaccggccgacactgtgtcggtttcggtttcggtttgtttgtttggatatccgtgattgtttcatggttatggcttctagatgaatactatacgtatgtaatactgttgtttgctaacaatgagtcaagttggagatagcttggtcttagaatatgggttctttgtttgtttcatgtgtaggtgactcgatgcctcgggagagtatttgcagtgatggaccgggagtcggcttggtggtaagacgatgttcgtggtggtcagatatcatgcgggatactaaggctagagttgatgcacgtggttgatggagattccatatggcatacgatggaggtattgtgtgtgtatgggatgcggagtcgaatttggaaggagtccaaatttggtacgattggttatgtaaagtttctttcttgtactagagggttttctaaggtgtttaggactcttagtatgagtttggttcgtgattttaggctgtctacctcatgtataaatagagggggagcgtgaggcttcccggtatcgcttttgagagcaattgagttgctagtttagttagggtttcgagtttagtcgagatttttgtaaggagtgctgttggtgcactttgtaaacacagagagaagcaataaagttgtcatctactttgagagttcttcgatttgtgtttcaccgagtttcggcggtccaaccggcgacacaccggcggtcagaccggcgagaagcggcggtcagaccggcggtggctagtcggtcagaccgacgttcatcaggcggtcaaaccggcgtatacacttcggtcagaccgcgatccatcgatttcgagggtaacttttatttccgctaaaagtttttagtttttgggtatatcaaccattcacccccttctggttggcttagttattgtgattcgatcctaaacctaatctcctaaacaatatgtttcgtgcaaaaaaaattctttataaaaatatttctaaagcaatcttttaactttgtagtagttaattgatttgtctataccctcaaaaatagttataaaaaaatcagatagtttattaattccagctatcttaacatggccgtagtggcatgaaaatttagtgttgaataatacaaaacaatagaaacactaaggccgagttttagttccgaaatttttcttcaaacttccaacttttccatcacattaaaatttttctacacccacaaactttcaacttttccgtcacatcgttcgaattgcaactaaacttttaattttggtgttaactaaacacactctaaatgaatttgtaaatttgcctgtttaagtcactgctatttttcttttgaaaggccgtattacatttggcaccttagctgtattcaaaattgtttctttgcatgtttcggcacgacacggtatcaggggtgcctagctcgtggaactgtttcacgcaagtccccgggtcgctgaccaccaactgcgtgatggggcccacacggcgcacgctgttggtcccacataacagtgaccgcttctgtccgagtacaaacacaaacagaacaggggaccttgaccttgaacgtggcaccatgtggtttggtttcacgcccatgatttcctttttcctctttgcttccaaatatataaacgtgtttatataaaaaaaagggaatatagtattattgattagtgatacggaggtgggaaaaaatattgcaagggtttccagaaatatttgcatgctaatgacagcccattggtcacaagtcacaatggtaaatctctagtaatgaaaagtcttcctaagagatattaccgacatgctgacatgcgttcattaaagtaagtttgtattagtcagctgatgctaactaatcattctgtgaatgtagtataaacagatgcgtgccaacaaccgatattggtattctagtgacaagtgcctcaaaaactaaccaacttactgtaatagttctagggtcctgattggggagcttctaacagtcgaagatttttctagaaactacagttactagaagctcctctcaaataatccaaatttttacctaaattttaagaaattgtagttgtataatccataaatgaactacgagccacatgttatatttttcagctttttcaatttctcaccagctccttatcatattctttaagctcccaaaaaggtcctaagattccataagatatttactttgcgagcatgttgagtgttgtttttttaaaaaaaaattattggacagcatgggtgcatttggattttggaactcggactttgctttcatatgaaatgacagaatttttgcattctaaaacaggggctaaatatgagaatagagcacttcaaaaatatcatcattgttggagagtcgtgaccaaatgctggtccacaaaatgagggccataattgagcaggacccctagagaataaaatgcagtccattgtttgtctattaatttgtccctttccattttccctcagaatgtagcttcgaagaaaagcctccaaagtccaaatggaatatatgtgtagtagctcatcaagcatgaaagaaatgagcatcatgtgatagactgtagtgtgattattgaaggaatatgttcatgattcaaaatattattcccctagagacatgtttacagtagggatttcgctgaaaatccttatgatcagtaggatgtcgtaaatgaaatcttccaaagagtaatagctgcatcacatttgtatggcctctcgtcccttcgagaaattggcctttgtcggttgtcattgcattttttttatatatacattggcggctgctacaagttcgcacgttttgattttctatttgagttggtgcagcacaccggtggttagctgtcacatggcttttttttctagtagtatttttctgtttgcatgtctgcacaataggatcgatgtttgttgccgaatcttcctcatactagctgtcgactgctcatccccgtgcaagttcatacagggcaagtgacgtacacgttcacgaatgcaagttaaatttggtgatttttctgacgggaatgttcagcaagtctagaaaagggaaaagtgttcacaatatgttaggggaaagtgggaaacttaaaacgaggaggaactattttttttctttttctgattatgcatgggctctagagttttgcttgcacgttttattaactcctaaacggtgcatttttgtataaaaaagttttcttgatagatactatcataaggcaaaacttcaactttatagtagttcatttatttattcatagctcaattagctaccgcaaatatcagttaatctatctattcatgcatttcggctatatgacagtttcccaatttgaaggcgtttacgggtaattaatgtgggatgtagtgatcagcggtgctgactgctgaattatatatcgtacgcttcaatctgacagattttgcgacaatacaaaatgtactggctgtgcttagttctcgggtaatccaggtctaaacatgtcattttcacaaaaggtatgtacatacgttggtgaaattggctgcatattgtcaccatgatcgagacgttttctgtcaaatatacacctcagtagtgtttgctaaaaaaaaaattgagtgtagccgtccagaagaaaccaaccgatgctgcaaatgcgttttataccgatctcaagtaattttcaagtgctactgctcagcggttttccagatgcaactggcatggtctccatcacaaagattggaacttgttatcaccgattgaatcagctcatctatactacagtattaggccatgttatcagcaattagctgcttgatcaagcttgtacacaaaagcgattccgtactgatcaagatcaatgtctttgtccgatgttatatgtgcagtttttcagttgcaatttgccactgcaaaagcaatgcagggagagtctggaaacgaaagggatcgcgtctttttcacaaaatcaatgatagaacacgaagctaaaatgactagtcggggatgaaaagcagattgctgccctcattacaaccagaattgtcaaatggaagccttagcttagcgagaaagcaagagaaactaataaccagaacttgacgatgcgaagttgcagatgtaatacaagtcagagcctcagaggcaaagttaaagccaactggcgaaagcacctatctgaaaccgtactgcttgagcaaagaatatgccattgccatcccaacaatacgatgaaaggacaagcagaacgaaatcgccatgaattatatgtatgctttctagagaatttcgtttttgttcacgttgctatcgatcgaaccggatgttcatgttctaccttccacaagtagatcttctgcagattaaccccataaaaaaccttgcagcttcaagacggacagcgaaggcggcttcgtcagaattcaacacgtcgaaatgcaggacgtacgtacgttcacattttggtcgagcacggcacgccacgacacctccaaaacgaagctgcagggagaagaagaaggaataaatccaaacccaaatcagccactggaccgatccatccacggaacagtttctaccccttctaggcgttcgcgtcgcccacgcgacggacacgcggtcgctgggcggcgcgcgccactgcaaaatccgcgcgagacgaaacgatgccgtgtcaaccgcgagcgccgagcgatccacgcgacaaaaaagctgttcacggcggcgccacgcgcgcgtggaacattccgtcctatcgatcagctgcacgctgtacgcgcgcgcgcacgggaaaacgatcaatcggcggttcatcctccgactcgtttcgaccgaaaaaccgatcgatcgcccggaaacgaagctgcaggactgcgggaggaggcggtggtgtagacgcagtcatcttcagagaacccgacgtcgtgtaggagactgcacggcctacgtgcacacacagctacacatgcaacactacgttcacacccacgcgaatacgtctcctaacacatgcagtatgagggacggaaatcaacgtgacatacctaattttactaaagttccgttaaaagttcacttatattgtgtaatattcatgggcatcagaatttaaatcctgcagagtgaaatcatacaccaacaactcaacatgacaccactgtttagtactaggagactaggagttttactactttagaatcgttctccgtggagaccaggagtcaccgtcggtgcgtaactgcgtgtctaatcgtatggatctacatgtatctatagttttcatcgtgtatgtatttttaagagaaattgttattcttgctgtgtaaatttactacaaagtttattgatgatgaaagaggaaaggaagtttcccacattttttatattccccgttattgcaaaagaaaacaaaatcattctctctttcgtgagacatgatatttggggtacgattttgtatcagattcgttgggtgatgttgaggcaatttaggcttagtttaagaacggaatatgatatctcaacttccatgctcacttctttgccgcttctttatacggatgatttctttttgttaacgtggccagacactatagcaagttggttgtttctcccacgaaccgttcaaagctacgagtcgcccccttaacttttctttctcgtatcggtgacatcatcatggcgccatcaatcaatcaacctaaacaaaaaccaaaataactcgtatcggtgacatcatcatggcgccatcaatcaatcaacctaaacaaaaaccaaaataacggcgcgcttctactctcttcatgcgaagttactatgcaatccgcggtggacacgacacggcgcctcttcttcgtacgtgccgcgcgcgcgcccaggtgtacgcacaggttgacgtacgcttccatccgagtccgtggcgaatcgcgtcgcgtggagacccggcgcgaggtcgcggatgggaaacggtaaaaaccggagaaaagaaaaaaaggtctcgcgtatacgtggtcaagcaagcccgatacagcgacgggaacgtgcatttcacacacatcacgcgctagtatttttaagcctttgtgtatacgtactcgcgtgagcgtccgcctcaagacttggacgtcccatcacatctcgacagttgctgcgtctgcgagagcgacgtgtgatgctgcatttgctgcctcttataggtctttttggaccattaattttttttctaccttttcctttttgtacgtacctacgtgaatacgtgatctctctctttttctcccactctgcagtggcaagttaagatatcggaaacgaatcaaacgatacgggacggggggtacgtggccgggtgcgtgcgtgctgagactggagaattgggagtttgaatgggtcatcccgttttgcgtacgtacgtaggcgacgaagatctgggatcgagggagtagacggtagtcgagtagagggcgatggggcaacggctactttacatgtgcgcgtctgcttgtagaccgtagacctggcccgtcgcgggtactgcatgtggcagcagtggtatcttgggcgtagatgcatatgcatgaaccccgtaactaattagtactactattattactacttttaacgagtatcaatcgactagttttaaaaggaactgtacgtagttaagtacgagtatatcataatccctatagtgcgctagtgggcactgttcatcgccgttccattgtcgtccggcggcgtgggcacgctagggagaggagggatgtcgagtagtacggttttttggttgcagtgtgtgtggcccgtgtatacagtactatacaaaattcagggctcgtaggcacggccatgggaacgtgtagctccgtccggccgtcacgccagggtactgtcaataccgaccacagcagctggggtactgcaaatcgcgggtattcgatcagctcggaacgggacgcttttcatgtgcggtcggcgccgtgctagagtttcatacggaatcccgggtaaaacgagatgcgaaatgatgaatacgcggatgcacggtcccatctttgctaggcctagtttggcccaacggaaggctgacgttaggctgggccgtacagaaggctggcactgggttgggcctccattccagaaaagatccgtggcacactaacaggcagaaattataggataaatttgtagtgatatatatacttctagaaaattagaagtctgatcgtcttagcatgtgaggttttttaaagagatttcttatacgagtcattttgtatttctaaaagtgaacaaagtattgtatttccaaaagcgaacgaagtatggggcgttttcgtttttcaaaaagtgaactaactatagggcgtttttggtttaataccctactaaaatttagcagtgtcatgtagagttaaatttttttttggcaaaccttgccaagacgacaaacatatatgtaataatgcctagaaacatacgaagagcgaagtgttttgtttgctactctatgtttgacttaaaattttggtagcggatggacaaatttgatacggtatcaaaccaaaacgtccatatgtttccaagacagtaagcggcgaggcaatttatactctagatgtataatcttgaacattttcttccgaaaaggagcaatcacgcaggcaaagtctcaagcttgaatttgaagcctgacaacagcggttagatgaattgcagaaaaggaaaagaagcaaaaacaaatatggtgcgattcttcctgacgcatctctatacaggttcatttttgcaacaaagaatggcagaaatgcctgaggacttcttcaccaatgcttatttctccaggctatcatatcatattagaagaaataatgccgccatcttctcgttgtcagcctatggaagagtagctctcaattccttcctgtctgccccaaatgactgcaaaatcaaggttcggttagaaatggttcatcttcaaacgttcaaaatgcagctgaggtcaattcaatgagacctggttaaaaccatacaggctcattcagtgcttgtgagttattatcgtgtggttatgggcaaaataagttcactctaaccaaacaagacgtgcgtataaaacataagctgaaatttgtggtttaatttaaaattgtaaaaaatccgctattacaagccagtgtactgctccattagcctccataagcagttgaaaaaataagtgcaccataaattgaaatttctacacttcaacttcttagagaactagtaagaaaagagatacaccaagctgtaacttcacattatgaagagaatgtgtttgtgttttaatcaagtgcagtgtttgtcttagtaaaaggaaataataatgcagacttcaatatctgagacgacttagatgagttagacttctgaacttacctccacaccaaaacccttgacatatacattcgtaaagagctcagaagtatcaggcataggactctcctgcaaatattaaaaaggggtatatgtgagtgaaaatctaattcaaagcaaaacaagtaaacaaaaaaaaaaagaagcaaaatgcagcaagaacctttgctttcgcaatggcatcatcgacttcttttctgatttctttctccatgtcctgagacaaaagaacaagttaatgaatcataataatacagagaatataccactaaatgaaattgcatctctagtcacgactgtcattatacatcacttaaacattaaacatatttgacatatgatatgataccttgagctcagcagcagttgctaggtcatgagccaaaatcaacttcctaaccctttcaattggatcacgctcctgttggcatgataaaacaataattcgttaaaaaccaaacatctggcgttaattacaccacaaatttaagggtcacaggatcctcacctgtcttacacctgagatctcatccctggtacggtaagtgcttccgggatctgacatagaatggccatggtacctgtaggtatccatttcaagaacctaaatacaaagagtggggaaacattagtaaccatcacttactaaaactgaaacatttcattaagggtgaattgctacaaactgctagcaggcacaaccatgttaagtcaagtaccaacaggacttaagcatccatagagtaaataaatctgttacttaaatttaagagtaaatttcacaaaactacatgttttatggttcaaattgtagaaaaccacacacattttgacacttggcacttaagtacatatattttggtagtttagtttcacaaaaccacgctatcgataaatggattcacccgtgagatggcgtggttgttccatctaggatgaggacgcgacatcctattaatttcgtgcgattgctggtaataggatgccatgtcctcgtcctaggtgaaacagtcacgtcatctcgcggatgaatccattcattgatagtgtggttttgtgaaactacactaccaaaatatatgtacttaagtgccaggtgtcaaagtgtgtgtggttttctgcaacttgaactacaaaacatatagttttgtgaaatttactctaaatttaataacatcaatgagcaaccaaaaacatattatataagaccataagtagtgtatcgctattaggttattccatatttcacgtcacaatgttgtcctagcagtaaccaaagtcgctcaaggacacagcagctatgtatcagaaacaaagtgctgtcccttcgaaggaacttccacataaaacaatctattccaactctagttcacaattaatctatgaagttactctgtgagtgtataaaacacaaataggacaaccatgacaaaagaaacaagctctctggtgtaaagcacctaattgccatagtgtattttactcatcaattgatcaactagcagctaccatcaaattttcatagaaagattcaggatatgttgatgaacaaaaagatccagaatttaagtgactgaacaggaaaatgtaggtcaattaagctgctcaagttgccagcactgattcttcatgtgaaaataaacaagaaatgtgaatcctaagccactgtagttcaacagtagcaaatctatataattgcgctacataagtatgcatactattaacacgacaaagtttactcacaattgggccatttgcaatagcatgctcttttgcgaatttgcatgcctgcttcacagcaagaacatccattccatcaacctacaccaaagcaattagatgatgtcagtggcagatattaagtagaacttaaacataaaatgaaaagatttcagttgtcaatataattcaaaataggaaagaaagaagaaagaatgtgtcatctcaaacttaaaagtacaaaccaaatgtataataccatagacaataagctacagaagatgaaatgcatttaaagaacaattaacttcaatctacaaagctataaactaaggtcacatcgaaattgtctttaggtaaccattgtgatttacaatctttttttccaatacttgttagaacagatagcacatgctaaaagcatctataaccttcaaccaaggcagtctcttctgcaactcaagaaataggcagagtcttatgacttatcaggtcagactctaaaattaaaatccactgcaagcaaatcacatatcacaattgggaaccaacattacaagaatactaaacattgatcaatccagtcactacgatgagcaaaagtaacaacagtgagttcacatcaccttcaatccaggcacataatcaccacgcttgtagtaggcagggctctttgctgccctccactcagcggttcccatcccatctgcacaagggaaatcgaatcaagatcatatcacatcaaatgaacaagcagatatcacgatgcaatcatgattcccaaaagcggcacaggaactcacaatggttgttttcgcagaccaatatagctggcagcttccaaagagccgatatattgagggcctcaaagagctggccctggttcgcggcaccatcaccatagagggcaaacgtagcagtttcctctttcctatacttctgcgcgaaggcgagaccgcatccaaggggaacctgggcgccgacgataccgtggccaccatagaaattggcgtccttcttgtagaaatgcatggatccgcccttcccgcgggagcacccagcctggcggcccatgagctccgcgaacgcggagacgaggtcgccgccgcgtgcgaggtaggtgcagtgatcgcggtacgcggtgatgatggaatcggagcgggtgatggcggcctccatcccgacggcgacggcctcctggccgtcgtagaggtggcagaacccgcggatgagcttggccttatagagggaatccgcggcgatctccatccggcgcatcacggacatgtcgcggaagaaggtgaggagctcggccggggtggtggtgacgtcgcgcgagggcgggtcgacgatgtgggaggtgaaggggaccgaggtctcgatggtgagcggcgccgtggagtccgagatcgagcgcgccgcgatgagcgccgtggcctgggcccgcgcgggggggacgcggcggaggaggatggccgcagccatggctatggctgcctagggtttcgcggcggcgacggcgaggtggatttgggggtgggtggggaggaaggagataggaagagagatttttccttgagaaattatcgttgcgctcttaataaagaaataaagaatggggctcggttggttggtgttgatgggcttcgcgggcctgcggcgcatattgctctcggacagtcgtgtgggcgtaaaaaattgcgagtaatatatatacttatctctgtgaaattttattggttcaaactgagtttgactagcataagataatggagaaattcgcgagtttaaaaagttggttagacgacaattgacgtcaggatttattattttgagcacaatcgcatctgatgcacttccttttttattagtatagtagaagatgtttttatatggagtctgatctgtcttctttaggttttttttttctggttttgttggttgtattgtcgttggagctaaatacatctggagttctggacagtagcctattaaaaattcatcatctttgcgataattaaaaaataattatcacagaatgattgaatataaataaacaagggataaatatgtaaaattataattccagatcagaagaaacacataattacagagatataaatgattttccgaagaaaaaataacaatgagaattggactacagttaaaagcaaggagacaagaatttgttatgacgtgtccctgtcatgacgttgggaatattataggtcattataaacaggtgaaggcaaccccaggcgatggcgagggggcagttcactcgcaacgacttgtttcaattaaccgtcgatctcaaacatactagttcagcaataagattgcataatgcatagtgcaagcaactaagcaatgctagaatagtactacgaaatgtacaatgctttctctgaccaaatcctttcagtgcaaaaatagatttgggctgtgtttagatccgaagtttggatcccatcacatcaacctatcatacacacaactttttagtcacatcatctctaatttcaaccaaaatctaaactttgcgctgaactaaacacagccttgggctttacatccactggcaactgctgacaattttcaggtatgtgtaatcatccttacaaatacacctatgattgctaaagtctttttctttttgatcttaaactactacagtactacaattacattttacaccatctggtactcctattatactggcctggtaggatggtttttgactacttgagcagagttctgtttctgcttcaattgttactggtaacaaattcgtaaccccgccgtttgacttattcgtggaataagccaaatggcatatttgcaaatggaatgtaatttgtggatataatttttatatacgtgttcttaacaatttagaaacaaaggctgaaaaataaattccaacatcaacttcaaatttaaggttaaaaatttaaattttaactaataagcataagcataagcgaaaagatgaagcctttgaaatggattcaaagcctcagacagcgtatagtatatacagaaaaatgagggatgctgcatcgcaagaatctagatgaactgacaaactttagaatgcacaaacgtaaggaaagcttatagctagatgaattaacagttacatgcctaacaatgaggcgagtttatcttttggactgaatagcctggatatttcctgcattgagtaaatacaatggatcctaggcctaggtcatgtctttgttccctcattttcttgacaaattgtacaggtaaaatcccaagcacgcggtaagaaatacagtgcttgagattaatgatttgactacaaaaactggttaatgacaggcatgccaaagtgctgctgcatcatgctgctgccttgcgcaaattcagagtaccacgatttccaggcttccacataatgagcaaaaagatcgcccaatgctgcattcagaaaattgtggaagaaatcatgagcaattgaatttataacagcatggtttccaaagtaaaattgtcatatagtactctacttccctagctgcatagattatcctagtacttttagtacaaagaacttggcaccaaagtccaaaaaactcatgcaccatttaagtgaagccaagaaacaaaatatagcaaaggctgaagatcctattgatatatgtgtatgcaatttatttcagctagaaactagtatcaaaactaacaaagttacaagcaaaaactcagggaacaaacaccagtgatatagctcaaatctaccagccaatattacagaaactatgtaaactttcatgaaatcaaatagagcatataaagcatttgcaagattcattttctatggttgatttttcaatccacatgtttcactttctatcagtatgttcaacttaaatcacttgaaaaaagatgtcaactggtaggaaacagatccactgaaggcttgatgctgtaacttcagagtggcatggtatatcaatatcagttagagacaggccaacaaagtgggctgtaacttcagctagaagcctagaaacatgttatagtactcctcacagaaccagagacaggctttttcctacccaagtcatattccataagaacaaaataaccttttttttgtctaagagatggaataagatcatggaattcttgtaaagggtcaaagaagagtttaacccaccttggttctggtattgtggtcgaaatgaagcagcaaggctctcccagttttgaacattatctgtgtgtcctttattaccattgtcaagctcttgttttcttgcaccagcagggtggaaaggcccataaacaaaaccacccttgctaccctgcccgagctgtttctgcactgacaatttgcagttcttcaaaatttcaccaccactcagtgtcagctttgctttctttgggattgttgagtccagtctgcttctgtttatgtcaatgttagtgagttcagtcccaaatgctctcttgttcgatatggtcttccctggtggaggtactgcgattgtgacaccattttcagcttttggtttccccgctgagcccaaccaccggaatgcaggtttccttgagtctgcctgttgtatctggaagccataattcaatagcaagtgttaagaaacaggttctaactcatcatttaactacatcctataagtaaatgtatgaaccccaccttatcaatgaaattcagtgatgacagcacgttagcaatgtcatacagtctccggactttagctgcatcacaaatacaagaaagaaaagtattagcttttttccccctttcactaggattactacaaaaggttgcataattcagtataggaaatggcagtactgacttctcatactgttctctgcgtgaccttctccaagtagcagctttgcagcttcatcaagtgagattgtgtcaacctgctccgagatcccatttcataacaattactccaagagcattacatattttgatatttacaacagaatcaaagacgccagcaattgcttacctccatggtcaggaagagtttcacgaaattctgcgtgagcaacccaagcgacttctccttcctatggtctgcaaatgtaaaccaaaatactgagtttgacacaacaaaatgtagctgtagcacaggcagtaaactagcactaaaaaaattaagccgtaccagatctaagccggcagcgaggtgcgcctggcttgttgtcagaagggttgtcaactggttgactcagcttctcgctctcggtatcaccatcagcgtcacccatcttatcttcatcttcgtcatccgacatcttcacatcaccgaatagaagaaatgaaaattttggttgaaaaaataaattctggcagatagctcgattcaaatgttcttgagaaagataaagataagatagcatacaatggctgcagacggctcctccacgggcagaggagccaatccagacttctctctcaatgccctctcctgataaagccaagaggaagaaaagaagacgctttaggggtaaactgtttgtatgtcacttaaatggttataaaaaaatttgaaaaaaattggaaaagtgtattaacatgtgatataacactccacaaacatacaagttcaaattcaacttctacatctcgtaacgaaaaaaaacaaattgaaccgcagctagttaacgtatatccagagtcaaatttgtttttttttcgttgcgagatgtagaagttgaatttttacttgcatgtttgtggagtgatatatcatatattaatacatcttcttaatttttttcaaatttttttataaccatttgagtgacatgcaaacaacgagaggatatcccctcgagggatcaaaatcctcttccacgctttagatgcattagaccaacagtttcttgcagaattatcacatggaatggcaacacaaaccttgagttctcgcaatgccattgggacgccgccgaagcctatccaagaataacgattcttggccttcctcacgaggatcttctcacagatgaatcgaaaacaaatgtcagaatcaaatcgagcaagaaagaacaagaaccctgtccaggaaaggcggaggaagaaggaactcacccctacgctctcgagcacgttgacgatgtcgtagatccggcgcctctccacgccgagcctcctagccgcgtcgtccagcccgatagactccacgtcgtcgcggttgtacagagcgacgaaactagaaaacgcacaaaaaaattcggtaagaacagggaaccaaaacgccaaaatccacgaatcccccagatgcacgagagatccccacttggagcagaggaggccgagcgacttctgcttgcggctgtaggcgtggtcacgcagcttcccgcctctgccctcgacgaacaccggctgctggcgttgcgggagagaaggcaccgcctccgtcataaccacagcctccgccgcgtcggccggcgaagacgagggtacagcagccatcaccgccgccgtcgccatcgattctgctcgcgaggattggatcttggtgcgtccgcgggtgggagaggagagggaattctcgcggaagtattatagatggatggatctggacgggttgcgggaggcgccggccgttgaaacgaatctgaagaggagagggggctttgatttggcgcggcggtggcggtatcgcctcgtttcaaaaattctctcgccgcgcaagggctgggtcgagtgcacgccgcgcctaccaccagcaacccgggtggctgacaggtggggtactcggtttctctcgcgctaactccgctttccatggccccatgcgtcagcggcagatgggagatttgaatgagcgcgcgtggtcccaggtgggaggcccacttgcggtcggacccatgtgtcggttagtgaagagggggtggaggagctgacgcggaggcacacgcgccctgtttgaaatttaagcggcggccgcgcgcggcgtgcgcgtgcgtgcccgagcaaacaccgagaggcggttttgtgaggcgcggggcggaggaaatgggggcaaacaggcgtgtgatttgggggggttttgcgcggtggcggtggacgcgcgcggcgcgggcacggacgggggcgcgggcgatttggctatttttccccacggttggtgggtcggggcgggtgtttcgaggggatttgtttagggagcggcacgtgggtggtgtgagatggcgcgggggagcagaggcgcggcatggccttcttcgctggaatcggatcaggaatacggtgatggttttgggtccacgactccacgtttagggtggagccgaagccgatgcaatccggcaacagcggcacagcggtgtgcaaagggacaagcacaagctgcacaaaactgcggacacagcgcaaacgtcaagcacagcttcgccacctccgctgtgccttttgctgcgttgtggaaagtgccaagttgaccccgctagcatagttgtcgagtcttgagtgtactgtactactgcattgtctgttctcggttctcttcactgctgatctgctcgtatggtctgggtaaaatcctgggattttgtatgtgaaactaatatctgaacaattccaacaggccttaatcggaaaagaaaaactcaggcaggtactttcatcgtaggtccagggactccaggctgatccgtgcgaattatgggccggtctcttgacagattattgtgttgtaataatgggccagaccttccatgggcctaggacttctcttagggcaagagcaaatgcgtcacggtatttgttcagcctggggctggcacattggatggaacttgtaccaagcaacttaaccccacagtgcaagctaattgaactgggccccaccaacatcattttttcatctttccccccccccccccctctctctctctctctcttctttacctttcccaaaaattccaatccatcccctcccaaccgattcctctccagtctccgggcgatcccgtcggcggacttggccacgtctcctctcgcgtgcccccgccgcctcgtccgcgtcttcctcgccgccgaccggaactgcacgggtcggggcgcggcgcggcactggcaaggctcgccagatccgacagccgtggctcgtcgaggagcggcgtggcggcggcgagtctcgacgacagcgtggcagctcgccagatccaagtggcaacgactcgtcggggcgcggggcgagaatggccgtggtcgtggcttcgtcgccgtcgcactgccctcctcgcctgcaccggcgagcccctccctctctctctctctctctctctccatgggtgtggatgcgattctttgatttctctgtgaaaacgctgacgaggtactcggaaccaaacaaggtcacacgaacctggttgagacatgggtcccacccccttttcttctccacgtatgcaatctgcctaggtggagagtggaggccaagtgccacgtagatgcacagtgaatggccttgagcagtagaggtactagctatgccctgttttcaaacggtacaaattctcccccaaatgaatctgcagttatagtctatagaatctttaaaaaataaattagaaatatgtagtcatagaattaaaaaataaactataaataagaaactaagaaatacgtattctcacctcaccaaatggttactcgtgccttccgaacaagactttaaatgccacccaccaaccattttaaacaataacgccgagtcgagactcgagagtgaaaaggcacagaagcactgctcataactgaaatcactcgggcagtaatgccgttatgtcaagttgtcaacaccttcagagttcagaaagaaggcaaagaaaactcacgagcacagaagctgttttatccaaactatttacaggatacattcatagcttcgtacagaaacacgttgtgcctacattcttataaacggaaaaaaaataaaacagttctgaagtaccacggctgcgcgggacaaaagataatggccaattgtcaagcccaactccaccagcagggtttcatgaacacggttactgtatcctcattctccatttctcggtgaggctgtataatccgaatccctgataattagtgaggatccagctcaagaaacgagttctacctcaggatctatgctttgcaatactgcagtgactatgctttgcaatagtgcagtgactcccgtagaacaccatgatccatgcacaccacgcgctttcagttccggctccaacaaaggaaaaaaaaccctcaggaagtctcagagaaagagagaaaatgttgctaccttcatgcttatgtatgttctaacttgagcagctcacacatcaaagaaaatgtctttgtcgtgcctagcccatcctgaagaaattaggataggaaaaacaataattagttgccaagtagctgagcagaaagtaatggtattagaaaaacatattgggaatttgaagtgtaggttggtgggaaatgtgaaggaataccagtctgaagaaaaggaattttcagctaggatacaatggacctatataatgttgacatgccactagcatttaaatcattataatgctatgtattacatacaaaaggtattacttttctgctgctatgttagtatccactaccagctaggtctccataaaaatctgattggacaactaatgtttatatctatggacactaattaagttgtagagaaatgttgttatgccataattagccaataattaccttgactttggtaaagtcaaatcctttcttctgccttcctgagcagtcgctgttctcgcagcagacgaaatgttcggctcagctaacgggttggtgacaaaaccaccctgaactccaaacttttgccttccccacttgtaagaagttctgctcccctccgaactgtttcgaccatcagagacagaaaaactagaagagtatctactagcatcatgacgcctccagaattttgggttcagaatgcagcatgagttgacatgagcttcgctgtttgatgtccttcctgacgaggcagctaaatctcgggagatttcatccaatgccatctcaagtccatgtacccttgtctccaaagaattcatgccattctcagatttccccataaatttctgataaacaagaggaacacaaatgtcagatgaccttccaataaacatggatggtatgagaaccttgtagcatgaactactgtgtataattcccagagtgaatactgactatatgggttgcaatttaacatatcaattgatgcatggcaatttaacagatgcgagtacagccagcagaaagataaagtggttcttctggactgtgagatttaaaatagtgataaactgataatttgcatattaaaacatagtgatatagcacatgtcatgttgctgttccaggttcccccccccccccccccacacacacacacaacaaaaaaaaataccatgacattgctaaatgttcaaaatacattgatttgactagtgggatgaagacattcaagtggcaattatacatgatgcacacagtagcaatacctgtctggcatatgcaacaagactcctgaccaccgacaatttagagcatgacttaacatgcccattcaatagtcaatgcaatgagaagtgggctttacccttctacttattagtctgcacagaagtttcatggctacaagccctagcaaggaatgtctagtgtacttacagcatgtttttgaaaggccaaaaatcgaactgtactgaaaaaaaacatgcctctgtatttatagcaaatgcacctttcttgttaatgaacatgtactgaacagaccataaaagattagtagagctactgtgaacatgtactgaacagacagccaacactggctagcgttgtcatttaaatatgaatgatcaagagcctagctgaattaaattgtacaatgtaaggtcaagccaagcaaaggaaatcacctggataagatctagtaaactgctctgctgattttcaatctgaagcagttgtgaccgaatctctgacaatccctcgtctttgtaacctgtctgaaacctctctgatccgccaccaatctcagaaatttcttccatgttaccaccctcctcatatggaacgactcgtgatcctgctttcagtccagccaccttggtcgccctgtcatcgccatcctggaaaagcatcctccttgcttccaatcttgatctcacattgcctcctttcagaagcttctcctctgtcaccactttgattggggtggcatctggtgtaacagcaatgtcaaccttgtaatcacggttcttcgcttggcccgccttgcgatatgaaggaggtgattgcttcttgtttctagctgatgaagagctatgccttttgttgacactgggtgaggcatcaggaggaggcgacctgcttgcaggtagactattcctcctggtcgacgatgcaaccggatatcgcccatcacttgcactccctatagaatccagcacatggccaactgttcagagttcagtttatacaaatctaatagcagtaaaataaaatcatcctctttattttgatctttatcaaaagcacttgattccttttgttccttttactcgcaacatacaggattacaagagtccaagctaaattaccagatctgagtaacaaaagtagcaacaaaagcagcaattagaactacagaataacaacacagctccaaaatagtaaataacctgcaagagaagatcgtcgttgagagtgcgatgccggtggcgcaccggaggagcattcgtcctcttcaacatccgggatctccttccatgcctcgatcatcctgttcatcgaatctcgcacaatcttgacctgcattgccaaacaagaacacgaaaagactcaaaccctacgctcagatccagaaaaaagatgaaaccgccaagatccataccgagataaagaaagggaaccaaccttgtcaaacctcctggcctcgaacatggtgatgcaagaagatttgtagctgacgagaagatccttatgttctaaggccaatgcagcaagagcctcggccgcggcctttctcgccgcccagtcgtcgctggcgattgtgtcgcggaggcacgggacagaggcggtgacttcagcggcgccggccgcggatgcagagacgccaatgagagagatgagcgcgggcttggctttgaaggcattgctgcggaggagcttgaggaggcggggttggagcttgtggatgtaggaagcgaggtcggcggtgggggccgaggcctcgacggcggcggccgtggcgagcgcggccgccgtctgcgcgcactggtcctgctcgtggaggagcgcgtcggtgaggggtcggagcgccggggaggcggaggcggacgcggccgccgccgcgcgcgcggtgtcgacgagcgcggcgcgcacggaggagtcctggtcccggacgcggcggagtgcggcggcgaggatgcgcgggacgagcggcgccacggcgtcgcgcgggtgcgccgcggcgacgagcgcgagcgcccgcagcgcgtggcggcggagcggggtcttgtcggtggggcgcgcgtcggacaccgccgagacgaacgccccgagctcgtccgcggccagcgcccgcgcgatggcctccagctccgcggccgccatggcctccgtgtcgcggtccgacagcttgaggaggcacctgttcacccgcagcttcagcggctcgccgccgcgcgcccgccccgccgtgcccatggccctctcgctgcggtgcgcctactctggcttggcgagacgagacgcgacgcgacgccaagatattggcggcgtgggctgggaggagttagcgggtcgcggcgtggagtggcatggaagccagcggagccactggccagtgatgtccgataggtggcgggtggggcgtaggggcgtagcggacggagcggcgcgtttatttatgccgctgctttgttttactcttttttttcctcgttaactttttctctttgttatgggagaatagctatttagtgcctaaagtttctctgtaggatcagtttagtccctaaccttttaaatggttaaaaaaaatccttaaactttgttataaggtctaaaatagtccttgggtccaccaaaatcattatataaatatgccatgtcatcattgatgcaaaatctatgacgaattgtccaatttacccttacgtatatcatagaaaaataaatataagggtgaattagacataaccatgggaaaaaatacttatctttttttcacccttttgaggtatatttttgctcttacattttaccttttgttttttattttcctatgatatatgtaagggtaaattggacaaatcatatagattttgcataggaatgtgacatggtatgtctatgtggcgattttggtgggatcaaggactatatcaacccacgtgacaaaattaaaggacttgtttggacaatatgaaagattaaggactaaaatgacccaggagcaaaattttagggaccatattaactattctccccttcgtttttcttctttcactttgcacaagagcagccttttttccggttcactaattttagctgggaatacccatatctctgcaacctgaatattggatggacatcgccgtaccatacagtaacacactaacacgggtgtcccttgtagatgtgtgtcggatcagccaatggaagcaaggcaggatgaacagtactgccacctgtatttggcttgatcggcacatacaaaaacaacttatagttgcgctttttgtgattattactagtaacaacttgatacgtaccacactctttgctgtttgtggccaatccagttatttctgaaataaaaagggcacactttttttagattttttttaaaatacagtacaaatgcgtaggtgcttataatacgggcacacattcacgttctattatgagcagctctgaaagaggcatacactataaaaaaaggattttgcaagtttatactactggtgattggagagacttataatcaaacgagcttagtccaaatcatttgagttataaccagactatctatttagggggggggggggggggaaacaagaacaaaacagacaatgccaagaagctacacgtcattcctaccgcttgatgactgatcttgacatcccaacataagcaatctagagacatttccgccatgtttatttgatgggaaaagagcttattcgtgcgaatttcttacggaactcgtatgctaaaaacaaactatatgcctgtatactctcccttgaaaaatataagtactactggctatttcttacatagaaaaaaatcttacatttccaaacatatggagtatttatttcttcacttaagggcatgttctttttagctaacatggcacacttcttaactctgctacgatttttgtataatatctcttcatcaacagtatttagaaatcatttttaaatcaacttttcaactttctaaaatttaatttattcgtttgtgccattgaataattatcataaactcaattttatccacaatccttcatccatcggtaccttttaacctacttcctacatttcatattataagttgttttgactttggttaaagtcaaactacttcaaatttgattaagtttatagacaaatataataatatttacattactaaattagtttcaccaaatcaataattaaatatatttttataataaatttgtcttgagttgaaaatgttactatttttttctacaaacttgaagcattttgattttgaccaaagtcaaaatgacttataaccagaaccagaacaggagggagtaggtaataaagagcactagcaattagcaatagttgaatttaaaaaataatcatagctttaaattacatgtcaatagtatcataaaattttgcttaaaatagaagtttagacttaaagttttgcttaaaataagtagaagtttagacttcatatttgattacttgtacatttgatagcaaaattactcccttcattctacaatataagactttctaatattgcccacatatatatatagatgttaatgaatctaaacacatacatatttctagattcattaacatctaaatgaatatgagcaatactaaaaagtcttacattgtgaaatggaggaagtacaaaacaatataaacgaataacataaaaagaaggcatacaaggttaaattctccatacatgaacatcaatcaaacaaaataatggtccaagaaagcactagcagactacaatagtgatcgctatgtaatagcaacagctaagggatcatttggtacaactcctattttgagggtagagcaaagttaaggatcggtggaaatgctactccaccctcgtaataaaattttcagaagcacaatggcagctcgctctatattattcagggcctcaaaagtttttgatactgctctaacccatggatagaaatcctggagtatgaggtgtaccaaactagctctatattacaatactttgtctccgatccactatggttatagcagccactattagagttagtacaaacgctatttattatctggtttataacacaccctaacatcaccactagaattggatatttaaccaaaggttcaaggggcgtcgaggagcaattatttgtaaaattcatgcgtagttcacgtgaagtttgtagtacaaagctaaagagggtttcacggccagaatccgaacgcgtaacagaaaaacagaatggaatgatgggatcagaacccttcagcgcaggccaccggtacaaggtattcatgccaggatgaggatgccacaccggtagtacatggtattcatgccagtatgccacccacaacacgctgcaatgctttaccaaccaatcttaccccggactcacgcgcgcccacgcccactgccagtctgccacgcataaatgatttcctgttcttctaccgccctacacggagtaaaccacactgtaattctactactcgtacgcctacgctgttttcactccgcgcatagcctgcctactcgccccgtcgatccggaagaggaggaaacgcgcgacgcgatgcgatcttacacgcaaaacgcaaccaaccgaaccggtccgatagccgtgagggccgcgacgaaacgcccatccatcttcgagaatttttagaattcgccacctaatacgcactactttcaggacgtaccatctcgtgctgtttttagaaaacaccaccaaagtgcgaattttctttattccgtgccactccgtccctcggcgtcagctgcgtcgtcgtcgtctgtttgccgctgccagccccgcgttatccccctccgttgtccactcatcctcctccacaacagctcgtctgacttccgtgttgtcgtccatctgccgccgctgccgtcctcagccgtgccatcgtccgtccgaccgccgccgctgccgccgtcgtcgtcctccgccaccgcccgcccccacgtctatcacgtcgttgtcgttgtcatcatcatcgtccgtccgccaccaccatcgtcgtcatcgtcgtcgtcatcatcatcgtccgtccgccaccaccgtcgtcatcatcgtcgtcctgtggagctcacgacccacctgcagagctccgcctcgagtgcgcccgcagcggtggccgcgtgtgcccacagctgtggcagaggacgacgatgatgatggcagcggcggcagatgacgcgaggcaggttgtggtggaggcggcaggcggacgatggtgcggcagacgcggggcaggctgtgacgaaggacgacgatgacaacggcggacggtcgacagcgcggcagacgcagggcgggcggtggcggaggatgatgatgacgatgacggcagtggcggacggacgacgatgatgatgatgacgacgacgacgacaacgacgacgacgcggcagacgtgggggcgggcggtggcggaggacaatggcagcagccggacggacgacggcgcggctgaggatgacggtggcggctgacagacgacgtcgcggaagtcagacgagcagttgtggaggaggacgatggcgggggataacgcgggacgggcaacggcggacggacgacgacggagcagctgacaccgagggacggagtggcatggaacgaagaaaattcgtactttggggcgttttttgaaaacagcatgaattggatggcatatcctgaaaatagtgtgtattgggtggcgaattctgaaaattcttatctatttggaccaagatttccgtttgggcatgactgggtgatcggcacgcgacgctgcggcctgcgcacctttggctttgcgctgctgcatgcgcatccaaaccgggcgtcaaagcaaaaaaagcacggttttgtgtacatatgtagcaaacgaaagcaaggctttcaacgctccgtccgctttaaagttataaacggcatcgagtgagcatcttttactacatgtatatatatacatccgaaaagcaccgaaggcaacacaatagcaggtcattagtcattactctatccgtttcacaatgtaagtcattctagcattttccacattaatattgatgttaatgaatctagacatatatatctatatagattcattaacttcaatatgaatgtgggaaatgttagaatgacttacattgtgaaacggagtaagtacatagtaatacgccacccacatgcagagatgattgcgtttggataatcgccatgcaatgtgcttggaccaggactactaagcctcggcaatattattagtccacatgacgatttgacggtagttacaccacaacgaggtacagtactgcctgtggaacatgtatgcaccagagttcagattcttgccaggatctcgtcaaacagtaggaacgtacatacacctctgacccccggccgttaattctgttattaattgacagacaacaagatcaaagttacggcactatcgatgagatacagagatctgaaacgtttataaccaatcgaggtttcaaggttctctcatacaaacagctgtgacccattatttgcaacaagaactcatccagaaattccaaacaacatgttgggggtgcagaataaccatcatctccggtgcatcaatgtccaccacaattcgatcccatcaatatggaatgggtcctgtttgatttcatgggctaattattagccctcaccttttattcctgaattagccctcaaggatccaaatatgtgggctaatttgagtctaaagtgaattagcccccctcaaaatattagcccctccatgaggtgctaatggggctaattttgtgtgggaaccatcaaaaatcagctctctctctctcccccctctctctcctctttttctactctctcttcaccttttagccttgaattagcccatggatccaaatataccaccctagactaatgtttagcctaccaattcttgactaaacattagctcttaaaattagccatgagctaatcttccaaacagggccctgaatgtcactcccatcatgcacctggatgtcactccagttattccatggggtgtcgctctattgctctagtgatctcgcatgtggcgccgtgcgccgctggtcgctgccttccgcgtggggcgtgtgtgtgtgacgagagcgccgcgccgcacgcaggcgcatgcatgcatgtggaaaaaaaaaccttaactctcgcttggattttccatcaatttcacgatccttcacatggattgccgcctcctgcttgctcttcgttactccatcagcatttcagcagctagcgtgcacagctaggaaaactgttttaaacactcggcgacgtccacctttgttcgagtggcggagccacactggtggagaaaccctttgtagtcccggttcgtaacccccctttagtcccggtttccaaaccgggactaccaatccgggactaaagatcgctatctttagtcccgggtgaaataactgggactaaagatcgatctttagtcccggttggtaaccccaatatctgtttctcatcgcgatcagccatctgttcatacaggaaacatctgctaagtcatgagacatttatgttttaacaatcttatattaaaactcaaataatcttatatgctaagactaaacgaacagtcatgtatgctaagtgtaactgtcgtatattagaaccctacacaatcttagaagctaagtctaattacaaatctaataatcttatactaaaactcaaatagtgatgatatatgctaagagtaggtgacgtatattataggaccctagctagtcaataaatatatactaagtctaattacaaatataataatcttatattaaaactcaaataatcttatatgctaagactaaaatagtcatgtatgctaagtgtaactgtcatatattagaaccctacacaatcttacatgctaagtctaattacaaatctaataatcttatactaaaactcaaatagtgatgatatatgttaagtctaggtgacgtatattataggaccctagctagtcaattattatatactaagtctaattacaaatataataatcttatattaaaactcaaataatcttatatgctaagacaaaaatagccatgtatgctaagtgtaactgtcgtatattatcgtatattagaaccctacacaatcttacatgctaagtctaattacaaatctaaaaatcttatactaaaactcaaatagtgatatatgctaagtctaggtgtcgtatattataggaccctagctagtcaaaaattatatactaagtctaattacaaatataataatcttatattaaaactcaaataatcttatatgctaagacaaaaatagccatgtatgctaagtgtaactgtcgtatattagaaccctacacaatcttacatgctaagtctaattacaaatctaataatcttatactaaaactcaaatagtgatatatatgctaagtctaggtgacgtatattataggaccctagctagtcaataattatatactaagtctaattacaaatataataatcttatattaaaactccaataatcttatactaaaactcaaatagtcatgtattctaagtgtaactgtcgtatattagaacactacacaatcttatatgctaattaagtctaattacaaatctaataatcttaattgcattacaaatataacaatcatatatatataattacgtcacttgcctgggcgaattccttcgagggctagctctaccactccggcttgagggacgactccgacaacgtcttttctacaagatacaaaaagatgtattaggataaacgcgaagtaacatatattacatttgacgttcacgtttcgttcacgatatcgttcacgttcgcgttctcgttaaggtcacgtttcattcacctacgtttgttcgttcacgttcattaacctgcctataattgcatttctcgttcacgttcgttggctcgttcacgttcgtccgacagcgttctcgttcacgttcattcaccttgttctcgttcacgtttgttctgtcgttctcattcacgttcgttggctcgttcacattcgttcgctcgttttcattcacgttcgttagctcgttcacgttcgttcgctcgttctcgttcacgttcattcaccttgttctcgttcacgttcgttcgctcgttcacgttctcggtgtggcggcagtgggacggcggcgggcggcgcggcggcggcgtggcgccgcgcgcggcatagggccggcgcgtggcgcggcggcgtggcgccgcccgcggcatcggcgtggcgcggcggcggcgtgcggcgtcgtggcgtctcgtggcgcggcgtcgtcgtggcgcggcgtcgtatcgtgacgaggtcggcgtcggcgtctgaaactcggcggccggcggcaattgagagggagagagagagatcgagagggaggcggcgcgcggcggctctcacccagagatgcggaggaggcggaggcggcggcgacgacgacgagcgcgagacgacggcgagatacggcggcagcgtcggcgtggggatgccctaggcagtggcggcgaaggagaagccgagagagatcgatcgggtaaaaacttctaactgttggtggagaagacgagggcgcgcatcgggaatatatatagccctagatctttagtcccggttgatgagaacaaccgggagtaaagattactcccggttgttgagaacaatcgggactaaaacaaccgggagtaaagatatctttactcccggttattctcatcaaccgggactaaagatattttctcgctattttcaaattctttttaaacccggttagggttatgaaccgggactactgataagcgcactgaatattattttccattacatatgtgtttctaaaatagaatataatgcattgcaattatttaaagtacaaagattaatgacaattacttcgaaaaattattgttgtctgtaataaattaagtggataaaacgtaataagcaaatatatgatttaaaattaataaaaattctaataatcatatatacttagcatatgaatgatattattaaattggtaaaaactctaattaacatatgtatatacatacggcgtgatttaaaattaataaaaattgtaatcatcatatatacttagcatagaaattatattaaattaaattgtgaaaaactctaattaaaatatgtaaatgccacatgcatgatttaaaaattttaaaaattcgaatagtcatatataattagcatatgaatgatagtaaattaaattgtgaaaaactctaattaacatatgtaaatgccacatgcatgatttgaaacttttaaaaattctgaagtcaattataattagcatatgaatgatagtaaattaaatgttaaaaactctaattaacatatgaaattgccacctgcgtgatttaaaacttttaaaaattgtaagtatcacatataactagcatatacatgatttaaacttgttaaaacatctaataatcgtgcgtaattaacatatgccctacatcaattgatttatatggataatcaatacatccaaaatagtttacatcgtgtacacaataattacgacaatacatcggcggtgacggttgaccgcacgtactttctcctcactattgttccctccttgtgatcgctacgtgagtaaggggtgtcttcatttgatagaaggatgctagggacaatcgtcaccgtgaaagggggttgcccatccaactgatcgtaatcctcgtcagtcttgtcctcaactccgtcgatttttcttttgcctaggagaaccacgtgacgcttaggctcgtcaggccctctgcccttctttcctttgctagacatgtccttcatgaaaaagacttgtgttacatcattggcaaggacaaaaggttcatccgagtatccaaccttgttaaggtcaaccgttgtcatcccactgtcatcaatcattacgcctccaccagtcaacctaacccattggcaccggaacagagggaccttgagaggactatagtcaagttcccatatgtcctcgatggcaccgtaatacgtaccagttgttccatcgtgtcccatggcatcgacacgaacaacgctgttttggttcgtgctcatcatgtcttgggctctcgtgtagaatgtgtacccattgatctcatatccctagaatgtcgcgatcgacccagacggtcccctcgccaggaaggtaagttgttggttgatcgactcgttacccatgagatgttgtcgtatccacgcggggaaagtatcaatgtgatgccgtgtaatccatgcatcggacttaccgatgttcctagcgcgaactagagccaagtgctcctcgatgtaaggagctaccaatgaagattgttgcagaaccgtggaatgggctttacggaataaattgttgtctaccgtcattattgctttccttccgagagttccctttccccgtagtctcccttcatggcgtgattcaggtaccccgattgggcgaagatctttgataaattctacacaaaattcgatgacctcctctgttccataacccttggcgatgcttgcctctggacgagcacggttacgaacatacttcttgagaacgcctatgtacctctcgaaaagaaacatgttgtgtaggtacacaggcccgagaatactgatctctttcacaaggtgacaaagcagatgtgtcattatattgaaaaatgaaggtggaaatatcaactcaaaactgacgagacattgcaccacatcattctgaagggcttctaatctatcccgatcgacgaccttctgcgaaattgcgttcatgaatgcacatagctttgttattgttgcccggacattgtcttgaaggataccccttattacaactggtagcagttgtgtcatcaacacgtgacagtcatgagactttaggtttgtgaacttcttctccttcgtgcttattattcgcttgatattcgtggagtatccagacggtacctttatactctccaagtattcaaacatactttccttttctgccttgctaagagtgtagctggctggactcaagtaatggcttcctttctcctttggttccgggtgaaggtcaccgcgttgttccatatgcttcagatcattacgtgcttccagtttatctttcgattttctgtatacacctaggaagccaagaaggtttacgcaaaggttcttagtgaggtgcatcacgtcgattgcgtggcgtacgtccaagaattcccaatagggtaactcccaaaatatagagttctttttccacatcgccgcgtgaccatcttcgctctctataggctggcttccaggcccctttccgaacactactttaagatctttaaccatagcaaacactgttttcccgctgcgatgtttagacttcgtacggtggtcggccttatgtttgaagtgcttgcctttcttccgtaccgggtggtttgctgcaaggaatcgacgatgacccatgtatacaaccttcctacagtgcttaagatacgtactttctgtttcatctatacagtgagtgcaagccttgtacctcttgttggactgtccggataggttgctaagtgcaggccaatcgttgatggttacgaacagcagcgctcatatgttaaactcctcctgtttgtcctcgtcccacacggggacaccttccttcttccacaacagcttaagatcttcgaccagtgatcttaggtacacatcgatgtcgttaccaggttgcttggggccttgaataataatcggcatcattatgtacttcctcttcatgcatagccaggggggaggttgtagatacacatcgtaacgggccaagtgctatggccactgctcatctctccaaaaggattcatgccatccgtactcaaaccaaaccgtatgtttcgtgcgtccttttcaaattctttaaattttttgtctatgtttcaccactgcgaaccatcggcggggtgtctcagcatcccgtcctgttgatgctcttcagcgtgccatcgcatcattctagcattccccttgttcctgaacaaacgccttatccgtggtattataggaaaataccacatcaccttagcaggaattctcttctttgttagctgcccgtcaacttctcctggatcgtctcgtctaatcttgtatcgtagtgctttgcaaacagggcatgcttctaggttctcatactcctcaccgcgatataggatacaatcattcggacatgtgtgaatcttctgaacttccagtcctagcgggcagactatcttcttagcctcgtacgttgtctcgggcaatttgtttccctccggaagaatgttcttgacgagtttcaataaatcgccaaatgccttgtcactaaccccattttttgccttccattgcaagaactccagagtggtatccaactttttgtgcccttgctcgcaacctgggtacaacgaagttctgtggtcctctaacatcttgtccaatttatgggctcccttttcactttcgcagtcctccttggcgttctgcaacatctgaccaagatcatccgcaacgtcattaccatcagcatccctttcctccttgcccgtttgatttccttcaaatccaacgtactgagcaaagttcggaatattgtcgtcttccacttcatcttcttccatttcaacaccttgctctccatgggatgtccaacaattatagcttggcatgaaccccgactcaaacaagtggaaatgaatagtcctggatgcagaatactccttctgattcttacgcttattgcatggacaacaaataaaacccctttgcctgttagcttcggccactctcaaaaaatagtgcacgccgtcaataaactctttggaccgctggtcagcgtacatccattgccgatccatctacatgagtcgaaaaaaaatcgtacaaaaataattattcttacaataatgacaatcatacaataataataattataagataattacaaactgtttcaacagtcatacaataatgacatatctttattcatacaaaaatcataaaatattacaccaaataattcttatttactatttctaaagttttaaactaattttaatgtgttttacttcttttaattttcattttagtttgttttctagtattcaagattaactttcactatagttttccttttcaactattttataaaaccttctttagcaaatcaactaaatttctatatattctttcttccccacacaaattttctccctcatcaacttacaactaaattttggagacaaaaaagtgtgcaaaacatagctgcaaatgtaatatgacaacaaaaacattggaagatgaagttgcaaaccttttagtcacctccgatttatatgtaatcaccaaaataaattcactagaaattttggcatgacctcccctcttttttgaagaaattttaaagcttgctcgggcagctggaggaggaagaagacatatatatatataggggtaggacttaccaaccgggactaaagatcccgggggggcctgacaggccctgacagcatttgaaccgggactaaagataacaaccgggactaaagatcaagtatgcccgttaccctttttaaccgggactaaagatcatctttagccccgatttttattgcatccgggactattgtggaattcggccgaccgacgaaagatgggtttctccaccagtgccacctccccggggatcggggtagctgtccgtgctcgatagggtacgtcgtacaccgtagtttgacgtcgctgaaaattgcatcgaatatggtatacagcgcatagaagctacttcatcgttcgggctctatatatgatgctcctggctccactacgttgtgcagtgcgatcaactaactcagcaacacatacatgacttatattttttttccacggagtatatccttgtttacaaatatatttttttattgtcttaattacacgaaagacgcacacgtttacggtgcacactgccatcgacctgcaccatactcacatatatgggcagagacaagcctatggcagtttagactcataaaccctaggcttacctccaatcatgttttaattatcctaaatcaccatgtaaaatatgaagacattcaataattcataagttgagcctgagctttgatgattttttttttttggctttggccgtgcttacatataatgcatccaacacacgctcaaagagatagaccaacgacaatcgataaatctctgatcaataaaacaatttttagttatgaatttaaacaaatacttttttagttcatagccaataagtcgctttaactcttttttcagtcaagctattttaatgtttgaccaagtttatagaaaaaaattagtaacatctataataccaaattagtttcgttaattgtaaaacagaatatattttggtatgcttgttttgtattgaaaaaagtactatatttttctacaagtttgattaagaaaaaaaaatcaaaacgacttatatattataaaagtgggggtacattttaaacacatagatgataatatttatgagcatcgagatttaaattctggtggatgaaatcatatgcccataactatactgacgcaccattggcgcttatatatggttttttttaaaaaaaagaacagcttatatatacatggttttactcgtaaataatgtgatggtccggaaaaaggccaatatggtccctaaagtttcgcttctgggttattttagtccttaatctttcttattatccaaacaagtcatttaattttgtcacgtgggctgatatagtccttggtctcaccaaaatcgccacatggatatgccatgtcatattcctatgcaaaatctatataatttgtccaattcacccttacatatatcatagcaaaataaaaaaacaaaaggtaaaatgtaagagcaaaagtatacctcaaaacggtgaaaaaaaggatgagtattttttttcctatggttatgtctaattcacccttatatttatttttctatgatatacgtaagggtaaattggataattcatcatatattttgcatgaatgatgacatggcatatccatatgatgattttggtggacccaatgactattctaggccttatgataaagtttaaggatttctttggaccatttaaaaggttaggcactaaactgatcctacgaagaaactttagggactaaagtagctattctcccaaagttgattgtgctcagaagtaccgtgatattctcaaaaaaggatccgttgatattgaattgcatgcatgggatccaccggacggttttaatggatgaatggatctaggcagacgttcaagcgggtgccactcggcgatgttggcctccaaagagacatcagtcagtgctaccaggcgatccatataaatgaacttttggcccatgaacaatgtaggagtatgtagttcaactcccagaacagaataagaggatcgatttatacttctgctcagctaacctgaattaatcatgctgcacgccggcctagtgggatatgatgtacataaaccatcttctagctaaagctagctacaatactactgttgttaactgtattgaaatttttgtgggggtgaatcgtcccccccgagatgttactccctccattccaaattgatctacatatttcataggtacaccaaaaccaagaaaagctaataactctctcatactatatttactttagcaataaactcaatgcatgcaccaaccctactattttctagccaatagcaaataaaaatattgcatgtgggttataaatacatgtgtgcatggatacatgcatcaaagtccatttactcgaatgaaaaaataacgaatagacctaataaatgaacacaaatatgtagatcatttaggaataatcttaaaaaaaattatatgtagattaatttggaatggagggattactacacatcgatctgcatctcatgatcagaactcgatcataaaaattccgtgttaatacaacatgttgaaattaaagtggcacatcacgtgaagggactgaaagggaataatggtccttaatttacgtgtgccacacgaggactaccacgtcccaaagcgacatgcatggcttatcatccctagcttggtttaaatacttgaacatctggaagggtttccatgccgtttggagcctcagctctcccagctgtatctaaatgttggcatacttggctcgatctaggtgtgggcattcagtcccaactgaaaagatgggttcgttagtaatttggctttggttagttcagtacggtcttcggtcatgtttaaaatacgtgacatatcacaaaattagatagacaacaagttcacaacaaaatcttagcgacatttatattcttttaggacatgttttaacaattaaataacacatgataatagcaaataatataggttgagtttgggaggtcctcgcacgaaaaatggtgttgcccattaacgcgtgattaattgagtattagcttagaaaacttttaaaataattgattgacacggttttttaaaagcaactttactatagtttagcagttttaaaagcatgcgcgttaaaaaaatatgtgagttgagaaagagggggaagaatacacaaccatataattaatatgccaattcaccaagatatagcgcttgttttctaattttggttaattattcgatcatttcggttaaccagatgaccgaattaatttcggttagtggaaaagcctaagcgaatctattatattattaaaagaaatagaaaaaggagcctccacgttcgctctcatgacctagaaattatcacattaatcggagaaaaagaaaaagctgagtccatatagaaatacaatttagaaatagctgaaattcggaattaaaaaataaggaatattagaagaggagactagagtccatatagaaatacaattaggaaataactgaaattcggaattaaaaatgaggaatattagaagtagattatagagtccatataaaaatacaattaggaaataactgaaattcggaattaaaaataaggaatattagaagtagagtatagagtccatataaaaatacaattaggaaataatagaaattcggaattaaaaataaggaatattagaagtagagtatagagtccatataggaatttaaaactaactaaaatttggaataaacataataaaattaaaagtagagtttagagtccgtataaaaatacaatttacaaataactaaaattcgaaattaagaaaaacatagaaagaagagtttaaagtcaatataggaatacaatttagaagtaactgaaattcgaaatcaaaaattaaataatattgaaagttgagtttagagtccacatataaatacaattagaaataaaaaaattcagaaataaaaataaataatattggaagaagagcatagagtctatatagaaatacaatttacagaaaattcggaattaaaacaaagaaatattaaaagacgagtctagagtccatataggaatatatataatttacaaataactaaaatttgatattaaaaataattattaactaacacgtatataaaatacaatatgaatattacacattagtagttttgtaaagttattgcaaaatttaaaattatgttgtcatttcaatatatctgaataatataatgagaaaacatatatgctattatatgagagaaaatataatgatgctagccgcgcaatctgcgagggccacaatactagtttctaattaataaaatcagtcttgattagttcggttttttcagtccaaccaaaacgactgagacatgggtctgattcacaagaactgctactccctccggtttcattttaattgacgttttggacaataacacggtctacaaaatatatatttgaccttatttttctattataatatatacaataaataaatacatgtttacttttattatattatagtgcttcgaaagacaaatctatatatgttgttctagtttctttaaactaaatatttttaaagttattgatggtcaaagttataaaagtttgacctcaaactttctaaagcgtcaattattatagaaccggagggagtactctactagtggattttctcacgtaattttatatgctgctagacttttagaagtgatacatgaattatacttttattgttcataaatagaattgtattttgtatacacccatatcaacggacttttacttttgttttcatacccacgacttattttgcatataaatatatcaattaatatatatcattataaactagactgtcaaataatcaaaaggtcaatattttatctttccgtccaattaacatggtaatttctagccatccaggacgaatccttatgatttcacagccttccagccagatatatatccaaaacaaaaacctgaactttttggtttactcttttggcgcttatacctactccattcgtctaaaaaaggttcaattatatagatgaatctgaatacacatgctattagataatttgacttcggttagaacggccatgtttaaaatacgtgacagatcacaaaattagatacgtagaaaacaaagttcacaacaaaatttagcgacacttgtattcgttcagaagcaggcgttggtgcaggcaaatcaattgctttccaaccttcgaaccgcacgctaggtcaggtgaggcagagggggacacatacgagagcgagagccgagaccgaaagagagctgcgattcctgtgcgaacccagtgattgcgccggcctcgccagcgcgggcgcatgtctggtggtctctcgcagcagcgagcgcagcgcccggtggcatgtggcctttgccggcttcgtacgcagcggactgccatgccgcaggggaaccgagccgcgaccgcgaaggccgccgccgcggcagcgttcacagcgtctcatctcaatctcagagcaagtttaagtttaatagttcatctatagccaatctaatagctcatttatacaatagttatacactattaatacttaatctcacctgccatacacacattgtgtcttgaagtccgtgctacagctggctataaatctgtagcccgctgcttttctctcttcttatttatcttcttaaaatatgtttgtagctggcttatatcctgctattgtacctgctctcatctcatctcttacgcgcgagtatacgacgcgcctcgcaatgatgcaccgttcgccacatgcgcggggggcgcgcgcgcggcacaaccattcgtgctggcttcctccctgtcacgcgcatgtgctcactttcttggaccagcccaaacaacaaaaaaactccctagtgatcatcgcccatgcccccagcgtcggtacgccaaaagtgtcattaacccgggtagcagtagtacattgacgaacgcgggtgtgtgtacttctttacgtcctccgtgtttcggcgttttattaaggcgatgaggtatagaagtgaccaagagagacgtgtagtgtctctcgagtagtagctgacaccaccaacaacatgcgcggaggcagcgtggcaacaaatgggaaccaatgggaagtgcatgttgtcatgagccaaccggtagattggtccataaacaaatgcaagtttcttgtatatcctgtcatgaactttgatgctacattatgcatggaggaccaccagaggtttggaaacattcagtggaggcgatcgatcagacacttgtccttggatttattttttttagctcgtagtcgtaaattgatggattgttttagtgctgttgattactataattgttgcacaggaagtactgttgagttttatgtgcaggggtgattattgtgaattattgaggagaagctgtcagtcctaactcctaatagtgcttgctggtcgacaatcttaggagcaaagcaatgactgtcggtcaagatatcgcagcagatatatagtaaactttgctgatgctcaagtcctgtgctatgatatctcaatgcaaaactgcaccaaaagtactcgcattgttagtcgtcacccccataaggccatgttctactgacaaaaactagagccgtactgttggtttagaaaagaaactgaactaaaacgagtgtgttgagattaagcatctgatcctctcctctgtgacaaacaataaagtccattccccccctccccccgcgtcgcccacgcgctggcgacacggggggcgaaaccctagcagcgccgccgcctttcctctcccccctcccccacctcgccgccgccgaagccggcgagcgagccatgatggcagcggcggggtctccttcatggcggcgacccctctcagcgtgggaaaggcggcggttagggagcgacggcgacggcagatcccggcgaggagacggcggatccggcatcaccttcgccggatctggccatcccctggccggatccggccggagtgggcgctggtggcggaggaggccgcggcacggcgacgcgtcaagggcggcgacgcgacgacgacgactcgcacggcagccggcggcggccgttgcgacggcgagatgcgcgcgggcggcggtgctcgcgccgccgggggcgagcgacggctgcagcgctgccgaccctggtgtcagcggtccgagcgatggcggctgcacggcggcgtcggcggagcgaggctcgcggacggcggcgaccggcggcgcggctggtgatgggcaacggcggcggtgccagtggcagccgcggctgtggcctaaggcaccagcggcaacgcccgtcagtgtggaggcagaggcctcggagctcgtcgcagcggcggcgtcagtggctgctgtggcacggtgtgaggaggcgcggtggtgcgttcggcagcagtggctgcggttgcggtgaccacggtcgccggaggcatggcggcctcggacggctagttgagggcgtggcaaacggctacatcgggccggcgcggcatcgtttggaggaggggtcggagaccggcttggcgcagagtggcgcagccgatgacagcggaggccggctcggcgcgagaggcgcgagcggcggagatggaggccggcttggcgcgagaggcgcgtccggtggagggaggccggattggcgcgagaggcgcgtccggtggagggaggccggattggcgcgagaggcgcatccggtggaggaggccggcttgacgcgagaggcgcggccggcggtggaagagacgacctctgtgcgaggaggagctgctggtgggtgtggcgcggtcttcgacgcacgaagactggccggcggaggacgccagtgcaggggtcccgcatgtcggcagagctggagaggtggtggagcatcggtgcgtcagccgaggattcacaggtggtgaccggcgggtgaaaacctagtccggccttggctaggccgacaacgatgcctgagggcgttgtcgtgctgcctcacccctcaagggcggttgccgggtgaaagcctagtctcggcttctttgagccccgacggacggcggcgacggtttttttccgtcgcttctcttcttgaagacgtcgtttttggcatcccttagagggcgatcttgtctgtgttcctttgttggtctagcggcggtcggtcacgcttagcggcggccggtccggtgctagccttctcccggttgtgtgttggcgctgtcgatatgcgggtggtggtatatttttttccttttcctggttacgaccttccagggtcgtaatcttataattttttcctgctctatcaatagaacttcgcaccgtctcgtgcgagtcgttcaaaaaaaaaacaataaagtccgttcaatcatcggacactaatacagttcttagagcgcccgcaatggtaaagtaaggtgctctctataaaacatatacatctcagcaatagactcgattaatagtaaaccaccttaatagtatgtctacattggtatctatagctctctcatgcattgcctcgtttttctctatagactatctctaagttagtagatagttttgctctctctttttatttaataccttccaaatagaaaaatatgctgacatggatctcttgtagagagcctataaataatcattgtgggtgtccttacgattagttgagattgattcactatatacctcccagtaacactgtctcactttccaggtgtgcgcacgatggaacgattaattaactgagagtgcagtccttctgaattatgttagtagggttggtgcgtgttccccacctaacattatgtacgggagtttaagggctttgacggtagagttaatctgaccttctattgctaatgagaaaaaagacaaaacccttcctaccaaaaaggctgaaaagtcattgtttcttcaggcctcagggagctttacttgatctgtttaaggggacgggttacctgtgtgccttaatgctgagtaaacgtgcaaactttgcttgttatccactcaatatggtactacctttttactaccagtacaccagaaggttttcctgcaagtaaaaagaccgcttagctaatttcattttgatatcaagtaacatcactaacttacagcagagactattttaccggtagtttcatatttttcctgtctgcattgtgtgactaaacactggcatccaggttttcaagattcagattattttaggagcacgtcatttacaaattaagctcgtactactactgcatgttcgtcatctgacaacagccaaacattgcgttctgtccgcttacattgttaaattcgtattaaatgtgtttctgtagtatcgctttgctctattcctggcatagttcaatcgatgtgcttcaaactcacaccttgacaaaagaacatgataaattgaagcctcggtgcaatgattacgactcgtgagtcctcgtgaccgttccaacgtcctcggccgcatagcctgggcacgcctacccgtagatagacagcagcggagaagatctgcaggaggagggagagggacgagacacgggtacagatttgccaagcatcaggatggaatggccgggctgatggatggcacgccacactccgcactccgcacgacggcacccagtccatcccgtgggcgccaccggctcgagggatcgattcgtgcgagagaaagtgtgaggtgtcgcgtccacggcgctccgcgctcgatctctggagccatcgcgtcgcgtcgaccgggacgtgccggctactggacgaaaacgcagccgcgcccacacccacggcggacgtacgcagccaagccacgcacttcttctccaatctccacggctccgatccccgcgtcgcgcgcgcagagctggctcgggcctcacgcgcgcacgggtattttcctcgccaagttgcgcgggtggagcatggccggcgagccgagacgttttctcgtgatctgccccgctgttcgctggacggtttgttgcgcagcattgggtttcctcgccttcttttgagatggtttgtggctgttttgcttgcagcgtctcgcgtgggatggccggctaggcggctagctcgtgcatgctacagcctacagtgtgcggtcgctttcgcggattactgcgcgtgatagagatgatttgattatgttccgtccatcagttcaggcagcatataattgcgtttctgtaactgccatgtccactgcggcgattgtgatcgacccctgctttgtttagtgtcggtctgttcgatggttgttacactcacaacgtataatcgcaaaggcaacatccgcaaattggcgatcataactcatactttagagcattggctcatcaactatatttgcctggaaaattgtagtcctgcacagtacatgagtagacaaaggcgtttcgaatggaaaccagtggatgtcgggactcaggagcagaatgcagtcgtggatgcacatgcaacagaatcgagcgatggatcgttcattcattccagtcgaatgtcggtcacctaatggatggtcagtgagtgataggtaggcaatagctttctttgttgaagcggtgaccagcgcgggatgctgccgcttgctgtgtcttctctcttggcgtcggatcatcgaatgcactgaacatatatggttttgtctcatacccagaataaaaacaacctccaaatatactcatgcccaacaagtatcttttggggtccggaccttctccaatggcaaatgcacgtgtaacgctggtcagaactcagaagtctccagtagtaatcgttgttcgtatggtgggtggatgcgctgctgtgcgtaatcccttttctggaccaactcgctcgtgggaatctccttctcgggcttaattgtttgtggtgagagggcttgatgggcaatcctggcccaatgtgcagacgcgccgccggtggttcgggattgcagaactctcgaccttgcgactcatcggcatgagcaggatgcatcacgtaatcacgtatggcgtcgatggtcgcctggtcgggacctggcagcccagtgggcgaatgatgtgcaaggcgatgcgccctggttctctacttatgaaatttgccagcattagcattattcgatttcaaattccattctctgttatgaccattgtatttggcaatactgcatgcttgcatataggtacacaagttccaaggcaatgtacatttctttgtaagaacattgtgttgttttattgtctcttaatgcattgacgtacacaacttctacgctttctcaggaaaataggagtatttcctagcagatatctcgacagttccagagttgttggtccggatcacctatcctcgaggaccgcgacccaaggcggccagcaaacattgcaaaatgcattacccactgttacttcatctctagaattatacgttttgtcgtgctgtgataggacaatcaaaatttgggtaaacgcaattttcatgcgccggcatgcgtcacgagaagagatgcctaaaatctatatacacatcatttaacatatggtgtggaactgtaaagataagtacattcctcaagctaacttcaaagcagggagtcttgattccttacttgttctattcggcaaagatcttctgcgttgttcagaacatgcaacatactcttcgactggaggaagactcggctcccccttatcattttttggtacttgtccccttatcaactgtagaagaagatgaaaaatcgactgagccactgatcatggggaaggggggtaataagcttcgaccactataacatacctttgatgcccaatgtctttctgcttgctggcaaatatccctgatatctcttcctgacatcctgcatccaatatccataattagcaagacaaatgaactgcatgtgcccagggcagtctatctgtagttcagatttcagaacagaacacatttctagccacgcggatcaccaatgatgttcccagatattacagtagtatagtgatggtcagcactgagcacatgtaacctagctgagtcatggtcacaaatgcctatatatgttttctggtatgatccatagtatacacgcacatgaatccatgactaaaaaggtacgagcactgaacactcagtgattaatggtgaaataatagagaagcaaggaacatatgaacacatgcagcctactctacaaaatgaagcacctcatttgaattcaataaatcagttctgaataaaagggccaaatagcttactgaagacaggctttgaagacgtgtatcagaggcacagatataattataattctttgaatttcttataagtactgatctttcaaccatgtgtacccaatatatccaacggtagcgagctccttcaagcagcttactgaagtcaagctttgaagaggtgtttacatttgtattagagacacaaatatcgttatacttctttgaacttcttgaaagtactgatctttcaatggattatggaacgcatttcaccatcttagtaatacaatccagaggaaacttggatgtttaatgaaagataattggtttctaaacaaatgtgcgtcaagttcaactaacagagtagggtaattcaccctagcccaaaactgccaggaactactagctgaatcctgatagtggtcgtttccaggacatatttttaaacctggactgcatcacacagcatgacttttatatatatttaacaaaacataaatatactaaaccaaaataacaagctttacaagacactgggtagataagtatctataggactccaatgcaacatcaaaatttgaagtgcccaatcagctagacatgaacaggtaaaataaatatgcagaccatgagctagaaggttcagaaaggacttactcttcagtggccaatgaaaattgaaacaattcagatttagtcaaatgttttgcatactgggcagatatttctgcgcgggtttgctgatccggtaagtcaaaacaaatgattgaatcaaaacggctgcaaattaacaacacaaaaaggggataaattaaaaaaagatgatatttacttcagaaacccatacaaaggataatatcatatgcttctctgggaaatgaattcttgcaagggaacatgtacaaactctccatgtgaaaatttaacaaggacttgtaataggaacaaaaagagaatgacaatagaaaacaaaaacatgcacacatctgaaaaattaactgggctgctaagaggaacaaaaggtgaatgattaaactatacctgatgagggcaggatcaaggtcttcctttctatttgttgcagcaataaccacaacacgtctatcctgctcaaacccatcaatcttcatagagacaatttatttagtgtcagtaaaaaatatattctaggacatcaattgccataagcatgatggtgacacctaagagactgcatacaaagatttctcgcaaaacttagtggtttcaagattccgtgataatgctgacatggtttatatgcctatatcatattacagtacttcaagaaagcaatagaacagtaatggactttcagaataaagaaagcaatagtaaataaccgcaggaaaaaaacatgaaaaaatcctgcacaatagtttagctacaatacataatttctgcagcccagtgaaattttatccatcccttatttaattggagttaaaactcctatgttttacacaggtttaaacagtattaccaagtttgcaataaacactgatggacagtgaaaaaaaatgacagttagaagtatagacaaactcaacaaacatatttacatcagagattaccagtatccagtttaaatggaaacaaacacaaaccctacctgccgcaaaattactgataatatccttcgtgtagcttcatgcatttcactatctcgagcgctagcaaaagagtctacctgtaacatggacgttcaaatagcaagatgttgcattaataccttagtataaccaacaaacaaaattcactatgcccctatactataaactgcccaataaaaatgaagaaaaacatgctatgcatgtgatacagtttttgtaccctacaaatccacaatatatctccgttagaattatgttctaaaaagtgttgctcgggaatatattatgaatgacatttagtttagttgtttttcaggtgaaactagatcttcagtatcatattggaaggtggtacatatcagttagaaaccagcagtgcaacaaaaatcaaactagtaactcctttcagcagaaaagaacaatggtatatcctgacagttccagtatgctaggcagtatatttcctgtacatttttacaacagttgaagtgcccttgatacctgtatactataaagatgaaacatacctcatctagaaaaattatacctccatcaggaaggtcattggcaagtgaaaaaacagatcccaaaaggcgctcgctttcaccataatattttgacattatgatttccagtggcacatataacagcggaactccctgtcataagaaaaaggcaatcaaccagcttaatacaactacaattcagcttaaaagttgcaagaaaggaatagcatgtttgtaaaatcaagaagtttacaaaacgtgagagtacttagtatcactttttttataacacagaattactttggggcaatctcaataagatatcacttacagcttgcttggcaataactcgagcagaagaagtcttaccagtgcctgaaacaatgagaccaaagtaactgttaagtatgcaaatacagcttgaaatggaagcaaccatactagcagtgcataaaagggtatctcatatatttactttcaatggtgtcaccaagctatctactactgttaccaagctatgaacatcatgaaacaagataacgcaaaggcaatggcagtggtttcttggtacagaaactccaatcaacgcaaagcaccattcaggttactcacctggtgggccttcaaacaaaacagctcgaggtcggtttgtctcaaatttgcatcgtgtagcacgggcaatttcatcgtacacttcagggctctgtaaagccaagaggatagtgtcctctatctccctataaatggaaaaagaaacatgcaccaagtttaaaaactatactttcagaaggaacacatagaaggaattgcccaataggaagctttgacgagcagcaaacaggactcgtgatgtgtcaaatgtcaaggaaatgccaaataaccatgaaggaaaaaatatatgtgcagggaaatgtttatcccctatgcttagacaatcacacacataattacgtagataatatatccacgatactaattttaatctaatgcaaattatttgcttctttgagtggtgaaagttacggatatgaaaaatgtttattgtgctttgaacacacaaagcatctcaaaacttacaaatgagaaaaacaaaatagagttgtagtaaacaaaccttttctgaggttcatatccagcaatgttctcccacataacagtaccactaccatccattggaatacttgaggtctcatcaaatccatagacccgaactcccataccctctaaatcagatatagttttttccatagatggtacatgcttggatctctgaccatttccttttcttgttgtgtatgacttattgcccttccctgatgattgcttaacatctttctggcccactaatttcaaaacacttgtcaaagcttcaagctctctcaaactaaatccaccacgcttgatgaattcaacttcctgaaaatacacataatgttaaggaattgcatttaatcttaacatgatgataaatgggcagtacatattgctttcaatatcttaataaaggatacataggaactgacagaatattgagatcccacaagtggttcaaatatcaagacacaaagatcatcttcattgtcatctccattgctcgttgtcttcttgtgagggttcaacgttatctgacgtgcagctacactggaacagacgcacttgattaaaacataataaatattaggaacttggcagacattggatctatgacgtggataaagatcattatgctatttgcagggagattgtatcagaaacactgatgataggaataactaggaaagtgggagcgggggctgcagggttaaggctttgaaattagaggaatccataaagacatggataaagaaacattactacttatagctacaactaagttacatctagacagatagaaatcatgggccagagatctaatttgtgcagcctagaagcagagaatgaacatacatacataacaaagatggccacaagaaaacgtacacaatacagatcaaagctgaaacagtactgtttgtggttgcgatgaataggacaagatcaccagataatggttatggtgaagtgaataacagccagtttcttttgctaacctgttccaagcacgcagtagcatctcagagccgccaccaccttgttctgcctcaagtccgatatgtgttacgagatcaacaataaggtctgataagctacaagttgatggtacattaaatttaacgaccacctatcagaaaaagaaacaagttgagtcagagaaaattaacaataattatcaaatgagcgactgaagattacacattgttgtagatgctttgccaatggcagagagataagctatgcaactgccagaactgtaatcagaataggcatgtcaaatccacaaccttcattgttgtgatctagaagcaaccacgcacaattacaattttttttaaaaaaaaaatcatacatcacattatccttgcactgatactcagacttaactaactcaaattttagtgtgtctacttcagtagtcacgacaatacatcccaaatccatatatcattaatcactgaatcaattgctccaatcacacaaagttccaaaccaactctaaagcctagtggcccaatttgatataaagtgtaaaattaactcagatttataaaaccgctgaaaaaaaaaagatattttccagcactaacaagcaacagtgatatggcctaaatgtttgggagaggaggacaaccttttggcccttcactgccacatcaaattgcgggtatgacccgtgtggcatccctcggctctgaatgagctctattatcctcttcctctccttatgggccagatcctcccccaccgccacatcagagctcacagccgcatcagggttcacaggtttcacagccgcatcagagcttacagccgagtctacaacgccctgtaacacaaaatcaaactcagcccgtgcaaaatctcacctccaaaatgccgccactaaaatttcaaacaggaaaaataaacaccacctcattggcatcggcgtaggccaccggcagagacgcgagagcggcggccgcgccggcggcgaggaagccggccgtagtgaacgccgaagcctcacgcgcccccggggcacctggtaccccattcaaaaaccctaaacgtgatcccagcgcgtgggaaggcgacgcggcggcgggacggttctggagaggcggcggtgaggaggtagtggaagccgccgcctcggcctgcagcggccggaggaggcgggccagcgggaggcggcggcggagaagcatggccatgccggcggcggaggcgtggctgggtttgcgatttcgaagctcgtgtcggctcgctcgagaggctaccggagagttcgcgccgcggcccgcggggttgttttggcgttgcgtttttgcccccccgcccacgaaagaacaaagcgtaacgcagaaatacgccttcatgtgattctccaatttgctcgctctcgctccgagttccaagcaggcccaaaatgggcttaaactatatgggccgaatcaacaggcccagaactataacgggccacaagcctgcagttcacgagcccttacaaaggcgcacacacatacactatctcaacgagcacctcagctagcgtatcttaaaattgacgaggtcaccaaagatattttagtggtacgtcgactacaactaaaagaataattaatcgtaaatgcgagcacatatgttaagtataagacttaaaatctaggtgaacagtattacagtacaccacaaaaaactcaactagttgagctatactcacttcgcaacctgatagtttattcaagagtttatttgcaggccatttggccttagtttgcaacttttacatgcctctaaaatgatgtgattcgtctattgtatctctatcactctcgttctaaaaagaatcaagagtgcaaatatttcttttcctcttatagctaactttagctgccggcatgcatcatcaatagtacgagtacgtgtatagtattgctacgatatatatcaagatgaattagcgtaatctgcatcaagaagaaacaagctgcttgaagttaatgggcgaggcgaagcccatctgcggcggcgcggagtagatggcggcggcgcccttcctggaggtggcctgcgtcccgtgcaccccgtcccagaacaggtacccgttgcggttgccgcagtaggtggagttgggcgccccgcacccgacctgcgcgttgagccggccgccgccgcagcacgcgctgttcaccaccttgaaccccgcggcggccgggttcgccgtgaggtaggacaccacgttgtacgagctgccgacggagtacctcatccccgggagagcaccggagccggcgagcctggccatcgccgacctgagcccggagttgaaccccctggcgaggtcgttggcggcgtcgacgcacctggtggcgcccgcctgcgaggtgacccgcaccgacggcacgcacccgatgggcggcacgtcgatgatgccgaaccgcctggcgcccaggctgtacagcgcctggacgtgccgcgtgtagttggacagcaggtcggcgtagaaggacggcacctggctcgccgtccggttgctctgcctcaggaacgcgaacaggtcgttgccgccgtcgctgatgaggaagagagacttggacagcagatcgtcgatcgccgacgccgacgccgacgagctgttgccatcgccgccgccgttcgacatcatctttgacttggtggccgcgaagtacacgatttgctttgtcagcgtgacgacggttgtcccctgatcgatcgacgagtacacgaagataatcagacacacatgtaccaagatcggtcgcattcattcaactactacactcactcaaatactatattaaccaattattgagtacaagaaaaggctaccagtagtaaattccttgcacagtttctacaagaagatgaaattttcttgctgtatccaagcatgtccttacagtggtatcgagaatgccggatcctccagaagcgtaattggcgccgcggtagcctcgcatgagctgacggctcgtctgcggcgtcagcgacaggtaagccggcgggctcctcttgaatcccaccagtttcgctgaaccaattgttcatccatgcacacacatcgtgagttccattattagcagaaattttacattgctccaaacaatttgaggcgaaatatgcacggaccgatgaagtcggcgacgttgtagccattgctgaaccttccggtgggcctcgagtgcgggaagtcgatgccgtaggggagctgcagcggcgagttccccggcaggtactggttgttcccgacgtccaccgtcgagtcgccgaacacgtacaccgccggcaccaggtgcacctcctccctctggccggcggccgccgccgccgccgagatatgcacgccggcgctgagaacaaatgctaccaccagtatcgtcactttcagcctcatcatagcgcctgcagaggtaggctgtagctatccaagcgagaacaagaatctactgtttatgtgtggattcagataggtgggattggttcctttgttcttcagcgagctgctacgtagcaactgggtaatattactaagaactttactgccaaaaggatgaattgcaactcaaggtagctagcagggtgcagggaatatgtgcttggaatggctgtggggcaaactgcaggtgaccacagtgaagaagaagagaggcacgctgctatcaatttatacacacacaaagtggtacacgtatcgtatccgttcataacaacggcaagcggccgctgcatgcgcttccgcttcccacgatttataaaacaacatctactttgaagaaactatggtaaaaattacgtattaaaattgatgtaccataaaaatatagatttagtatcaaatttgttatgaaactatagattcaacacaaattaaaacaacatactccctccgtttcacaatataagtcattttatcatttcctatattcatattaatgttaatgaatctatatatatatatatatatatatatatatatatatatatatatatatatatatatatatatatatatatatatatatataaaatactagaatgacttacattgtgaaacggagagagtatttagtaaaaacaaattacggaactaaagatctagtgtaaatttaaccaggaaatataacattcaatataacagtggtgctaatgataaaattttagttatacgatatttggtcttaaatatataattatatgataacattttagttttgtgatacatggttttaaattttgtagttttataatagtttaaacaaagtaccatgattttttatactaggtggcgagaatataagatgaggccttgggactggagatttggtttcaagccccatcgcatagatttttcttcctcccattcgcatgcacaccatacccatatcgatcagtgagacatgtatgcatagcccggcctgtgcgaggctagcttgaccatcaagggatcgtcacttgttaattttttttcgtgatttattgtcaattagccacacttcccccacctgctagctcgctttgcaattgcaagtggttaactggtgacagcgacatatatcaaaaccatgaccatttgtctctgatcgaaagaggagtccttgatacttcctccgtattttaatatatgacgctgttaatttttttgacaaacgtttaacttttcgtcttattcaaaaaatttatgtaattataatttattttattgtgacttgatttatcatcaaatgttctttaagcatgacataagtatttttatatttgcataaaatttttgaataagacgagtggtcaaacgttggttaaaaagtcaacgatatcatatattaaaatatgaagggagtacttaataggaatttaatcggtgatcagttactagctactacagtactaccacatgagagcaagttcaatagtatagtcaactactagctccaattcatttatagccaatctaatagctcattcatacaatagttacatactactccctccgtttcataatgtaagtcattctagcatttcccacatctatatatctagattcactaatttccatataaatgtgagaaatgttagaatgacttatattatgaaacgaaggaagtacactattaatacctggtcccacctatcatacacacactgtctcttagagttcgtgctacagctggctataaatctgtagcccgctgcctttctctcttctaatttatgttcttaaaatatgtttacaactggcttatagtctgttattggacctgctctgaagaagaacaaacaagacaacctcgaaaaagcggaacatgagtactacattcggagttgatctttgcatggcatgcaagcaacagaggagctagtattggctacgtacatacgtacagtacttacctaacggcgtattgggctattgcctcctgaatgcgtgctaagcactccaaatacctgtacgtgtgtacatgtgtgaatatcataagatagtcgtatatatcctacagttccatgcatatggtcaatttttcgtgcaagtctggccgtcggagcaaacacagtcagaaatatatcgatcattgaattgtactctaaggcgcatctctcagagcatacgtaatttattctgtagcaatgcgtccacacgtgcttgcataacagcatatgtgtatcgatggtgactaaactataaagtgataaggcagtcgaattatatttgaccactactcataagtcataatcacaactcatggctaataactataacaagtattttaggaactactaagatagtactgtttgatggagtatccgcttggaacagatgatgatttcactagctaccgatgaagaatcacgcaacgagtgccatgagcgccaccggcccatgccatgcgcccatgcctcgatcgttgccgttactttctataaccaaccgatatgcaaatgcagtacagcaataatcgatcgatcgatcggaaaagggaaaaaggctagagcctttgggcaagtgcctaaatggactagtggtcatccatcgcacgatagataacatagaccaatctgttgcttgcgtgcttccgtattgtcgatagaataaggatcagatcaggatatatcacgattcacaatgtggtagaccggtagttggcgaggtgatcgagcgcccccacacgcaagaaggttttatggtcgtcaccggcgtgatggtgccatttggcggtgagcactaccggtcgcaacacacaatcacaaattcgcaatgccatggcgtgtacgtgtctcgttctcccataccgttgtccttccaggcccttgctgcacatgcacgcgcgcactgctgctctgctctctgccggcctcgcataaacggagagacacgcacctatgacgtcacgatgcgcggaacccttacgtgcgtgcggccttacgctgccttcatggaggattgggcgtttgggcatggtgcggtatgtagcgtgcggcggcggtggcggagctagaaaggctagaagcatcaagctagcatggcaagttcgttggggattgggggcttcgaccgcgcgcgcgctcgtgcgaaaggatggcaacttggcattttggcaagcgcggggctcgcgtgtgtcgggtgccgactgccgaggaagttgtgctcgcgcggcgcgcgggcgcgttggacgaggattcgaggaacggaggcgtagggcgagccggcgccgatccgtccgactgagtcgtcgtcatcgtcagcgttttcacaggtgggcctaaatgataaggccgacatggccatatggccgataaggccgtcgtgcctcgtgcgtgacaaccttgttgggcccgtttctcctcagtttggtcttcgaaagcccgcatcacttgggccaagtttgcactcggtcaggcgcaggagacgcccaacccactcgatcgtccggtgccccaccgccggcggcagcgacctccgtccaagtgccaccgccggcgccggtggcctcgcagatgcaaacgcacgggaacgggacagatcgccgttgtacaaagtacaaatggcgccgccgccattgcgagcgaagggaggaaaagggcggcccgcgagctacgtgcttacgttggctctgtcgattattccagactccaaacaattgtgttatctgactccccgaccactgcttccttcgtttagggcacccgcaatagttatctacaggttctttacaagagatccatatcagcatatttttctacttgaaaaaataggaaagagattaaataaagagagagagtaaaactatctactaacatggagatagtctataaagaaaaacgagtcaataaatgagagaactatagatatacatgtagacatactattgaggtggtttactattaatatagtatattgctgagatgtacatgttttatagagagcaccttactttatcattgcgggtgctcttaggctaacataaaccaatgttttcttctcgttcctacctgcgtcgacgtgtgacacccaaatcatcggattcagtaacggaaaccataaactttaccctaaaaaaccacgagttcacacatcccaagaggtaggcaaggcagcggccacacgaatcgcgcaaaagatggccacgctggtatgccttgcatgctctcacggttacgtgccgagattctcttctgccacgttgcaaaaagagacgcgacctgtcttccctcttcagagttcagtccccaacattttttatgggacagataccagcaggcagcagttgcagttcctcaccaaaacgccatccccatcctccctgccatcctccctgccgtgagtgccttcttgcgtcgagtttgagcaaagttgaatacagtatctgctgtgttttttaggacaagttgatactgtggaggagatgaagaggttacttgttcgtgggctgttttcttctccatccaggggtttgttgggcaaatctcctgtcaggcctgcactttgcaacgatgctcttctctccagggtgagttatcttgtcctcccgcttcctgatttactttttggatctcatgccttctccatcattgtattactgtcgccaaatactccataaaaaaatactgtgatttgttcataagagggcatatttctaagctactgctcaaagccgagaggccaaaatgttcagttaacaactcagatttacggttccagtctaattgatgagtactacaactcgatttgtagttgcagtcactacgcggttgaaaatttgcaatctaatttatgacgatgtcaatttttgtagtatcgactagtgtgtttataatgttccattttcttgtaatattgtcagttcctctcaacggggaaagatgagaacacagtgaccgaaatcggagagaaggcaagatcaacagcggaacaattcctcaaggtggccaaggagaagactgacgaggtaagcgagaaaacaaaggaaacgatgcacgaaacaaaggaagcagtggtcggggagtcagatgacgagaaggagaagttcaagcagagggttgaggaggggaggtaccatcagaattaagtggctagtgctcaattatactccatcttgtagcttcagacttcagtgatggcctctgtcaaaagtcctagaacctgcagattgtccagtactactaggcttggcatgtactaggtagtatatgttgtttgtttcctcctgttcaatgatctgttgtagaatgaataaggtcaactttgaacttcatagtgaacttttgatgccactacttgtcattttcgcagaataaataagatgaacctttgtgaagctagtgaatgctgaattggatgtgcagtttgcaagaatttaactggccatctagtaaccaaaagggtataggcaaaaagagaaaaggatcggatggggatgacctatggctgtgagcatcaaatggcgatggctcaagaatttggtctgaactttgttgaaacaacgtttcagaggagagctggcaacgtctgggacgctggatcttaaaatatttgtaatactaatatagatttgcaagtagtgcaataaaacaagttaggaactgcaatcagctcatcatgcaggaagtacatggaaaaaggaaaccacaatgcttacgctgggaaatgaagatgagtgaactccacatcagctagcacctagataatagccatatcagtgggaacagatgttgtcctgtttgcttgtcttttctgcaatatgaatttcactatcagttttttcagggaaatttaagtagttaaacacatcacatagacagatcgattagtagtacatggtttctcttttcataagatcagtacatgagttatggtggtgaaattttcagctggtatcgactggtaaggtaaccattgacactgaagaatgttcttcttttttttgtttttccagctccctttaggagttttcggtgagaaattagtgttgttgaggttaaacttatccagggatcaacttacctacctacctaccatatgtccttttcctgttagtttctccatcccaatagtgctattgccccattatgaactttgaaaagtaagcatatatatgttcgtctaattcgaaacattttagtgctgttgttgtacagtactgatttggtattcaaatcctaagtatatactatccatctaattcaaaactgtactaaagtgctgaactgctgatgttgtacagtactgatctggtattcaaagcagtactggaattctgatgcggtaccattcatagtttttccttgacaaaaatatgtcatgtcgatttcactcgttatctgctttctgtgttccaccggaaatccacatcaccggcgccgacccatcgacagtcgaccacaggtgaaggcgaccgaaggtcaggtactcagccactcaggtgggagcaggttaggccggatggtttagcctcaggcaaagattcagttttgaagtgtcctcgcaaatcatcaagctacatcttgcagaacagatgaaagtgaaaatgatcacgacgcatcctatcttttgggtgatactacggtgttgtaagttgtaaccgatcaacatcaaaatttatcatatcaaccgagagcgatgcgctaaaaaaacaacgaatcaatcgatattgattcacatgtccatctacatgaaggtactccctccgttgcacaatataagttatttagcatttctcacatttatattgatgtaggtagacagtctagatttattaacatcaatataaatatgagaaatgctagaatgacttatattgtgaaacggagaaagttactgtacaaaatccagcaaataagctggcatgccccaactattattatacacacatgcataagcacaaccctacgaataaaactgcgtctacctaatcaaccaaccaaatcgttggtctgacagtaaaaacagcctagtacccagcgatccccgattcctcgtcagcctgctgcttcttgccgccgccggcgttcttcttctggcatttgtccttgatccactggaacccgtgcgccgtgccctccttcaccttcctcagccccgtcgccgccgccgccttggtcttctccacgccgccctgcttcttgccgccgccgtggccgtcccgccgcgccgccgcccgcgggctcgggtcgccgccatagtcccactggtcggcccacgacgtgccgaacgagctgctccgctccatccagaaactaaacgaagatcgatcgatcgatctaacgcggtatcgcctcgagtaatcgatcgatcagggaaagaaaactgtgttgctctcctctcctcgcgaaaaattgtgaggtcgcagtttttatagtataggtgtgcacccgcgcgcgtcccgtgtacaggtcatccgcgaagaattttcggtgcacgcgttgcgtttgtacgtgaggtggatggagagcagttgcgattctggatgtgtccggagattggcggttgggttctgtggtttctcgcgcggctgccggccgtatgacagttttgaccggaaagcttccagcaatggagagaccgactggtggggccagcagtatgcctggcccacatttctgtggcgtgcggatatctggcgttgcgttgaagagtctctggagtctagaatgcgttactactttgaggtgcgagaatcggtcgcacgacatttttttaggtggtcgtccgatttgatctgatcaatagaagggctgcctgtttgacaaatctggaacgaggaaaaactcaacaagtggaacgttttttgaatgtctgtgtttggaattgcttttgtgatttctttgtttaataaggtgcataccacttgaccaatctctaaaccactggataacgtcaacaaaagcaacatgtgaaagtttcatgtgtccagtcatgacggctgaaaattttaactggctcagggaagataaattgtatatctataaatatacatatgtttacattgcatgtaattataccaaatgggtacttatagaaaattattgtgttataagaataaatctaagccattcgggtgagaccgaattatgacggtttagatcaaacaatagtgcattgtagatgcaacatgataattattaattcttgaattttaaattcattagacaaagaatttttttaaagcgtagaaaaaactaaataatcttgaataaaaataactcgataattaattaaatcataaaaaagtgtaattgacaatctaggctaagtatacaatttattagttctaaatttcagagctattaatttaataaaaacaataaattgtgactcaaacgtgaatacgtttttaattcttaattcataatttactgtagcgcccgttccgtcgtggcgcctagcgggaaaatgtaatttctaaaaaaaccctaattgcgaaaattgtttcttcgcttgcagtcagtctccgtgccattccggatctcaaatccccgatctatcgtcaagttcaaatcccgagttcaaatccctccgcaaaagtctattttgcctccctcaggttcgatgggccgaattcctctcggcccatctctccctccctctctctctctttctctctctctctccctctcccccgctttgcacgtgcgccgcgcgcgcgtgcgcgtgagccgcgccgagccgagcgccctccgccctcgctgccgcttcccgccgacgccgcccaaatcgccgcgccgcccgttgcttcccgcgcatgcacgccgtggtggccgaccgcctggtcgccgccgccgtcagcctctgtcgcgcctgtccgcgcctgccgcccgtgttgccgctccgctccacaccgcccccgccgtcatcgccgtcgtcacaactcggccccgccactccccgcgcgtgcttccaaggaaaggaggcagggctcctcctcatcgccctctctccctccttttcccaaagaggcaaggggtaagcccccctttctcccttcctttttccttttctcttccccgccggcgtcatccgcctctgtcaccgttttggccgcgagcgccgagcgccagctcgcgccttgaccgcccaaggtcggtttccaaaccgacattgccgccctataaacccaggcgccctcccttcctttttccccctcccaatcctccccgtttttcgcccacgccattgtcgtccctctatctctctcgccgaccgccgccgtcgcgtgtgccggaggagccggtgcgcgctaggacgcggaaggggactccgggcgcttgtcttcttcctcttccccggcccaaggccggagagatcactcccatgccgtcggcccctcgtcactgcgccccatcaccccgcacggtagtgcctccctccgttctccctcctcgttccatctcctccccttagactcgggtagtagcacgagtagcctccccgtagctagctggcgccgccccgaccgttgccgccgctcgctgtgtgctcgccgccgtcgccgcccgtgctccgtagcgcccgctcgtcgccggcctcgctcggcgtagctccgcccaatccgacgctaggaacgaattcccggagtcgcgtagatgctctagctcgcccgaatcggtctcccgtcgcgccgtcgccgtttcccccttctctcgccgccggttgccgccgccgcaatctgccgccgtcgagcatcccccggcgaatccgagccgttggctcgtttcccctcgtcccgtgcaacctcccggtgtgctcgctttcgcctgtatcgccgtggttcgctccgccgctcgccgccgccgtccgccgtccgttccggccgacgtcgtcgtctacctcccgccggcccgcgtggcagccatgtaggcgccacgtcggcgccacctcggccgcgaccgggtcaagctgaccccggtccgccgcttccctctgccctccccgtgcgcgtggtccacggtgagccgtgaggctgcgcgtgggcccgccgtacccgcatcctccgcgagccacgcacatgcaccgcgccccgctccacaccctagcgccgcgccgcgtgctccctccgcacggtgagccgagccgctgacaagcgggtcccactcgggaccacgcgagatggacccggtccaccggctccctctctgccccccccccccgcgccctattgggccgtgtcctctcgggccggccggcccatttagctcggccgagccgccccttttctctcgggccgcgccctagccgcccgagggaagtttaattcccctccctctttcttttcttttttccaaaatggtttaattaaatcttttttcctttagaccaaaaatccaataatcttagaaattcaatatcttctcaaccgtacatctgtttgactccgttcaacttccaaaatttctcaaatctcgagatctaccaaatggcacgcttagaggtcaataatagggctttattttcgccgttgttgagtcgtctcattcgtgtgtagcttcggagcccgaagaccctgagtgcgcagatttcgaggatcaagctcaagatctcgagcaaggcaagtcacctttgatcatcttgcacctatagtttaaatctaagtatttcttttttgcaagtattgcatgaataggtttaacacaagtatttcggccgcggcttgtgagatagcatgtcggtcccaatcctaattgctgcaattaccctccttgaattattgaacacttaaaccccctttgtcgactgatgtgcttcgatgcacgggccttcgagcacgggcatcggaacacctcccctcgaatttaaaatatccaacgatgggtaaaacttgaggttttacaaaagacttggaaaacccgacacatggatcggtgcttgcgaactaaatgaatttctaaaatcgcggaccggggaacataccgggcgtacggtttcccgctcttgcacctaaggaccgtttccttggaatttcatccgaacataaggcaagtgcgaccacatgggtgtaatgggacgcccctggctgagtaattagctaatcaggggagccatgatgccaagagacatgtggattcaacggggtggtgtcggggagaacccccgggcttcctggcacagtatggtctgggacctaacctggtgttggtctgggacccctctcattggcatatggtaaacctgtgtcggctttcgaaatgccttgtcatgaaagcctcaaggtctccagacgtggccgttctgcacgggctgggtgatccgggttagtaatgtcgtgtgggtaaagtgtaccccctctgcagaggttattaaactgttcgaacagtcgtgcccacggtagtgggcggatgtgaggtgattcctagcgtagttttgtttgactactgctttgtgaaattgatgtcgtgaaatgggatcgaggtttggaaaatctgcggctgatgtgatcagccaggcccgggtggccgtttgaaagctgttggccgggtgccaaccttgatcaattcaaagactgatacattgcacatactccgaccgggcgagacgcactgtctcatccgtgtcatttgagaagcactcacttagttgtttcaaagaggagtttaaataaaatcaattgcaaaaacaacagccttcccgttgaagcctgcattaaacacttatttcccatggcttgctgagtactcctatactcacccttgctctatataaataattcccccccccaagttgctgaagaagatgatgtggatcccgctgacgaggagttcttccaggagcaagtcggctacgatgagttttagggtttcggcttagttcccaagtcgcgcctgtgatgattggtccatgtcttggcttccgctttcccttttgtaatgcagttgtgagctcgagatctgtccgcagcccaacatgactgtaatcctactctaaaataaagagacctctgttgctgtgatattttgtcttcctatgataccagcactgtttcctgggactggtatcgattaacaggttaatttggagcgtcacgggctagttccattcggggctagttcggggcgtgacatttaccaaattaagaaaagtactgttttttagactaagggacttccattttcttagcaaaactagcggaaataaatactaaattgagactcatcataagtacgacatgatacaatatgtagtatagattaagaaaacataaactaaagaaagtattacgatagattatgtatactttttataactaccaataagacgtaaatattaggaaatgtcctaatatcaaataattagaaatggtgaggctagctaggtcgtatagtccgctttttataactatcgatttttaatttcttgaactattgataaatgaaattgttttttccatgcgtactttgtagcagcgtttgcatatacaattaccagaacatgactatcaaagcaagattattacttaggcctagttattttcttctactccaaacttcatcttgctcgttttctgttagcacgttttttaaattgttaaataatacgtctttttaaaataatttatatataaaagttgtttaaaaaattcaaataaattcattttttaaatttataattaataatgagctaatacgttttctcgttttgcgtgcgctaaaaattctctcttttggagttgatcgaacgcagccttataaactttccgtgatttatatgtcaacaaaaatgtaatctcaaagcccttttcaaaccgtgatttctacgtcatcaaaatggaatttcccaaccctattcaaatgaaaaaataatttctgaccagttgaggcatattaataaagtttagtaaaatgtatattaccctagaaaaaccccctgtatattactccctccgtttttttaataatgatctcattaacttttgaacacatgtctgatcatttattttatttaaaaattttgtggacatacataagatgtaaatcatgcataaaatatttttagtgattacaacatctcaccacaaaataaataataatcatgaaaaaagttaaataaaacgagtagttaaatatgtgtctaaaaataaataataatcatgaaaaaaagttaaataaaacgagtagttaaatatgtgtctaaaagtaacggcattatgtatctcgcatcaaatagagcactgttaaaaaaatgaattagattttacatgcagcaggtagatatgactcgatactgtagagctctgggagattggacatcggctcgggttgcaacagggattggacacgcgtcactagggtacacggtgttgcccgggctgtctggtgcggcaccgccgcatagaattttcttccggaatatactactaatgaatgctaattgctaaggacagacgactaacgtgtcaatggaatcttccatggtgcttgaaaatttagagtttaattacctcactaaacaggacatacagtacgttttgatgctcattttccagagcatgacgaactagccgagaagtaactttaaataaaagaaaagagaagtacttcccaatttctctatcaaaaaaatatgtatgatattgatatctataattcttcagtaatgttatgtacacaagaatctgtccaaaagtcaacaataatctatcgtacaagaaatagaaccagagatggacgtggcaacaccgaggcacgaaaaatggactagaaagtctacggagctaagagcaggacaactgccggcacaactaatccaacgaacccactccacggccggatgccggcggcggccgcgctgccgtccatctcccggctgctcgtcgacggcgacgtcggcgtgacgcccttgaagtttgggttggtcccgtacaggctctgtatccccaggacgtcgtcggactccaggtccaccttcctcgtccccgtgcggatcgtcgggtacatgatggagtccggcaccgacgagtggccgagccccagcaggtgcccgatctcgtgcaccgccacggactccaggtccaccgccgtgccgaacgacgacgaggtggacacgtcgccgctggccacccacgcctccgcggcgtccaggtggaaccgcccgtccgtcggcgagaacgcgtgcgccagcgtgcccagtggcccgtcgaacgcctcgccgtccccgtggtcgccggagtagaacccgatcgtgatgtcggcgttcgacgccgaggacacctccgtgaactgcagcctcgtggcggcggcccaccgggagaaggcccgcgcgaacacggcgctcagcgtcgccctgtcgatggacgtcgcggacgtcgcggtgatcgcgtacctgaggttgcggcggaacggcggccacatcggcccgccggggaagtagctgtacaggtggcggccgcggagggcggccgccgacgagttcctgtccatggtggatgtcccgttgatgacgtcggcgacgccgcagcgcggggcgaccatctggtccacggtgtccgtgtccagctcccccgtcgcgttgaggccgaagttgcgctggtacgcggcgatggcggcctccagggagtcgtcgaacgcgtcgctgtacggcgacgacgacggcggcggcgggaggtagccgaagtggctgaggtaatccttgagcctccctagcccctccctctcctcgccggcgtggcacccagagaggttctggaaagcggaccacgggttcgggaacgggttcgccgtcgccggcaatcccatcgggaaagccatcgccggcgagacgaagacgaacgccgccgccgcgaccactactagcaaggcgagacgaggcgaggtggaggcgcccatcgctgaaaccttgagccgcaaacagacggagacgtggtgcgatcggtgcaaaatccagctgctgtcacgtaagatttaaggattttcaatggagtccaccactacgacacggattgcctggtcagcagccggccaggaggcgggaacgctcgctcgtcgccgcaggttacgtcgaacgaaatgtctaaataaaaattagcgcgtgtttggtaggtttggatcggtttggtcaagagattatcagcggatgtgtatgtgtgtgtgtggtcttgcgtctgtttcatgttgttgtcaactcgtgtcatattatctacgtgacatgataggacgtgtttagaattcaagcaccttttgtcaattcaaaataacaaagagttcgtgattggattctttatgcttacagtctgacctggcaagaagcttctatcgggttgttttccggtgagctacacgcaacacgcaagagataatctgacgattatagaagggtcgtaggctgaaaccatggccagcaattattgtcatcagtgccgttttcagatattagaccagagacgccatctcttccaactgcaccaccaaagcatacacgagatgcaaaagaacacacgtctcgacatctctgaatcaccaacctaaccaatcagaaaaggaataaccaacttgccaatcagaatgtagggaaacataatcttctggctagcttgacttgggacaggaagcattttagcccatgccattgtttctttatatttgctccatttaagaaagggaggaagaaatcgagaaaccatggcgtacaaagtgggaatgcagggggttcggttgttccaaagcgagatgctcttctcaaggcagttggaatctcgatttttctcatttaaacacgacgagtgaaaagtggaaaaagaatgttctgatataccttgtcctcacgaatggtctacattctaaatcaattttctctttccatgacaagttgataactgctatctcggctttgaaccatccgcgaaatacaaagtataaacaaagaaataatttagtagtgtacaaatgaacaaagcaagaaccaaaacactgacccggctctgagcagttgaacatgcaatacaggtgttcgactattcgacaggtgattgaagtaggtatttaggtggccttgattcagttgaggaagccatatctcttagctgggctgcctaagatacgccttttgccctatttcacaaagtttcaccacctcagcgaagacaaacaaatgggaaagccgaagatgcggtcatcacaaagggaggtgttctactctctttctgactgtttccaagcaaaatttccagcttcaaattttattgggctgaaatcaaacccgtgccgaccggccagaggtgatcaatttcggcccattgaccttatgggccggattcacagatttcccctgaaggcccagttgttaaggtccaaggaccagtaatagacttacaagacaggcatatcagcagttagaactggaactgtcagtgacgagacaaagatattcttcgatagttcaggagcaatttgcttatcaactggcgattagaatatttcagtatctaacctcctacaaatgctacggacaagttctttaccagaatagtggtctgacttatcagctacagtacagacaaaagatcatctcgagacgacaagaatggcggcccgcttgtaaaaaaatgataccgcgagtctgcaacttgcctagcaaaaagatcgtattatcaggaaagcgacacatacgggcacagagaaggatcgtccttagctttcacggagaagtgtactgatcaggaacaatcctgttttttgccgggccggcgaaggaactacccagaaacaatcagaaaactatctgcaatttgagctctgattctctgaacaatcaccattcaccagggcacagaactagtgcctcacaattcataggcacgcagacgcagtgtcctgttcgaagatactccatattggtcccagttgatctaccaggctaccttcctttgatttgtctataagcagggcagacgtaatcgcagttacaacgacaatgctggctttggcttctactagggctaagctttctgcttgtctcctcatgttcagcatgggatttcctctggcccagcaagggaacaccgaatgcgagtctaccgctcgcgttgctattgacacgaccggcatattcctgctcatttacgccctctgttccgaaggaagaatatcaactgtcagaattatgacagaggaacaaccttatcactgatttcagcatgtgtgattcaattccattatccaattgataattgttgttatcgagtgcgatcacagcaacacagtacaacatgtgcgccatcgctcggtttcactcggagcatagaaccacacaacccaataatgcttgtttgcacgtacaagttgattccgcagcatcacatagaggttcaggattttgggatggagtttctcccagacaatgttggataagtgtgttgtcgcttgcagtactgcagcacaattgcacggtaccaatcgagcgactatgtcggtgctgaattattcttcagaaaacagctggggattcgtcccatcttggtgctgaaactgttgtcatgatgaattcagatactaatttagcatgcctactcagaaccaaaaaaaaaaatccttattgtatttctttctctctttctctttttttgtccttttttacctacacacattgataaggctgacagggaagcaagcaactattataggttttgctaaaaaaacggcaccatattattttacttgatttcagtcacctttttctctttgtaatgatttttgctatatgtaatcaatttttttcgactatgcactctcttcggtctcagtggttctagagtccatcctcttgaagggtcgtctgtggtcattagctggctttgctttttttttgggatttcttgggagtgtagcggggttctgccctcgtcccagctgattggagttgcgtttagctatcgtagtagtctcttccttttctttggttatgtttttcccccttttcttggcataagccggtttggctgattgcatcgtgtaacaaaatttcttttcttctaatatattgacgtgcaattcttttgcgcgttcgcgtttttttaatcaattatttttaaccataattctcttatatggtgtgtattaaaaatttcagtgtatttattgaaacttagggtgtaaatgttggaattcagttggttttccttctgattatatttgaatgaaagtcacaaacgatatttgatggttgttcagattttatctctatggttctgttcattttgtaccagcgattcttcagtttggttcagataaatatatctgaacttttgccttatcttcagatttcggttttcagttttgatattgttggttttttgagctgtatgtggaagataagtctttatcgttccagattttcaggccgacggaaatcaatctattgtttgtttgttatccggcttagggataagattttcttgttgctatacaaggctatataagtcacgtactgctgctgtatttgttgcacgaagtttttgcccacatccatctgcttgttttgcatagagagaattacatcccacgaaagtccactggttcgttcttggccgagtgcacggctaaggatacgagatcattgtatcttggaggagagccgctgtccgtctcgtgcacctcggcgagggcgtgaatctccttgaagacagcgccgccggcgtgaagctgctgttcatcgttcggcaacgagtgacatcttcggaacctgcaaagctactgcctacgacgacctccaacagtaaatatagttaatatacaatgtaaaaacgatttgattatcttcgatgaaaaatgtagcgctatagatataactattgcttagaacgttaaggggacacggcagcacatgcgctggatgggaacgaaataaaaggcggattgggtgagatatcattacaagactacctttgtgtagaattgtactagaatagattcaaagaatgcatatgcaagcacagtggataaagtgtcatagaaaaggaagattgatgagctccaaaaatggtagggcagatgctggtgttaggtaacatccatggatacggacgcttagctgcacgcgaacggtggcaattgttaccccactagctagagcgatctttgcttattggacaacactgtgcgcgtatgacgtctacctgaactctccacagtaaaggctagtgtgcgaggattgaatcctccagggttatgaacttctgatcattttacttttgactgctgctagttttctctctatctgattatctgatactgacactctaccaagatttcgatctcgatcgtgatctagagcgctctaggttgtcccttttgcctttaaacatgagtttgagcttctatcatgcatttttgattatttggtttttgtgttggtctatggcctatggggtcattttcctgtttaaaaccaggcgcaaaaataataataataaaaaaactatatgatccatcctagcatgctatctgagtagccgcttcttattatattgcatgaaactctagcttgtgtttggatcgtttccctggagaagatttgattttctggtctagtagggtctcccgttccatgaaatcctcttctggtgagcaggaaggaagccaaatccaacatgaggctgcagaaggtagcatgctctcgggagccatgtcgctcgcgtcgcagccgagcctccgttcccttccttcccttgacgtccatgacctgaacacaagcccttcgctccaccaattcatcgccacgatcaaaggccactcgtcggcgtcggcgtacgtctccgctctcgccgtcgacggtgactcgctgtacatcgcctcgtcggacgggagcatcaggctgtgggcactggacggcgcaaggagaagtcaggaggagcagcagcaggatgacggttgcagcagcagcagcagcagcacgacggtcgccgacaccgacagctccgtcaagtctctcctcgccacgggcaatggcgggctcctcctgagctcccaccaggacggcaagatcagggcgtggcgtgccggtagccggcggagggacggcgagacacggccgcagctcgtcctgcgcgcggtgctcccgaccgccgtggaccgcctccggacgtgcctgctgccgtggagctacgtggagatccggcggcacaggaggtgcacctgggtgcaccacgtggacgcggtcaccgcgctcgcggtgtccccggacggcgcgctcctctactccgcgtcgtgggaccggagcatcaaggtgtggagcctgcccggcttccggtgcgtggagtccatcgcggcggcgcacgacgacgccatcaacgcgctcgcggtctcccccgacgggcgcgtgtacacgggctcggccgacaagaagatcaaggcgtggacccgcggccccgggcagaggaagcacgcgctggtcggcacgatggagcgccacaggtcggcggtgaacgcgctcgctctcggagccaacggcaaggtgctctactccggcgcgtgcgaccgctccgttgtcgtctgggagagcgccggcggcggcgacggcggcatggaggccacgggcacgctcagagggcacgcgagagcgatactttgcctggcggcggccggcgagctggtgtgcagcggctcggcggacaggacggtcagggtgtggaggaggggaggtgcggagaacaacggctacacttgcctcgccgtcatggaaagccatggcgcggccgtgaagagcctggcattggtgcgcggcggacgcgacgacgatggatcgtgctcgtcggagggatcttctgccctcgtttgcagcggagccctggatggagatgtgaagatctggagcgtgtttattccatgtttgtagctagttcgtgttcgttgtcctctgtggacggttattgtaaattctgtccacgtctcttaaggatgatgcaccaccaccaattctcctcacgatctacctacgaccatacattttttaagaccattttttagtcatatttttggttttttcagtaacaaacatgaaacatcatgccgtcacctacgggtagcctgtttctcacatcgttcatctccactaaataagctctctctcggacaacagccgtctgtctccccctttccctgccaagtgccaacctcgtctttaataagcttcttcagcaatctctcgatcgtcaaaacggaacatgcatgcgacgcgccttcgcacaaacctatggcccttggctggagtcaggcgtacgtgttatccggctttacgacttacgtgcgttggcgctcatgctgggtcgtcgatcgtgcaagtgttggcgtccttcgctcctctcgtgtctaactctattattacccgtagacgtagccgtagggccacacttaccgatccaattaaacgagactatgatgagaatatagtacatgtagatgtagccatgtacaatgacacggagaagacatgggccagcccgggagcaagaaacgaacgccgtcgttctctctccgtgtcttcacatctcgcaacaggagtattgctttctcaaaccgacaggcgaccgccgaacagacaagtcgccgtggttgcgagcaacaagccgagtccagcttgcgaacgcttcttgggccaactgtcatggtatacacacgaacctaccggacgagttggcccaaaacggcaatgtgaacgaagataggaaaaaggtatactttgactccctcaactatctcccgaatatgattcatgaccaccaaccataaaaccgggtatatcgactcttccaaccatcaaaatcggtgcaaacaacaaccctcggtggttttggctgacgtggcgcccacgtggtggttttgaccgggtctttgcgcttacgtggcactagattaaaaacaaaaataaaaaatatgtgggacccacatgtcatcctccctccccttcttcctccccttctctctctctccctcccttatctctctttctcaggactcaggagcggcagcggtagcggtggccgatggggacgaggcggaggggagcggtggcggcggggagcgacagcggcggcggtcgggagcggcgaggtggcggccgttgacgaacatctgggggagggtcacgtggcggcgttgggggaggagcgcggcgagctccaggaggaaggccgagtccatggagaggtcccgctcgtcgatggcggcgcggagcccccacaggatggtgcgcacggcgtggtagtcctcgtaggtcccacggagcgacatgtagtagagcaacacccgcggcccctcgccatcaccaggcttgctccagatggcggccgccgcttgcggctgctaccctgcgggttggaggttgtggaggacgcgcagcgcgcacgcggtgacgcggatgcggtggaagacgtgcggcggcgacagggagagggaggacaacgcggcatgcggtgggtggtgggcgccctttgggacgaggagggactggaggtccttgacccgtccccgctcctgaccgcctccaccgccgctcctcaccgccaccgccaccgccgccgccgctctcccccacgctctggccaagagaaaggcctagaggggagagagagataagggagagagagagggggaggaagaaggaaaggagagggagaatgacatgtgggtcccactatattttttttgtgtgaatgtgttgacgaaaaaaattgaacacaccggcctgggagatctgcttaactcctctgcaggtccaaagattgatgagatgcgggcgtgccagtcagtttgatcttgcaactgacaagatatgtaaacagcagacaaaatagccgatcggctgacaagccgatgtagtgattccagccgatgccgataccagccaatagcgatagggtttaagcaatcggctatatgtccaatgtagatgatgatataaaggcaatcggctgatgtaataaaataacaatataatcgagtagaaaccaatcggctagaaacaatatataataagcactgatccaaaggttaaagcatacatcggctggaggtccgatgtcataaaatccacaagattatattaaacaattaaatcttattgcgatcggctaaatccaatatgtatgcaatccttgtaagccgatgcaacgtccagataactcatcggctgaaaccccgatgaaacccttattggcaatcaagaaacaggttggagataatggttctaagcacgacttagtagatcaaacttaactgatgcagcactaagtatgaaaagaaacataatatctagacaattaagccgttgactgattttaagggtggtagatgcctaggctaatctaatctagcaagacgatttagccgataccggcagaaaccctaaagcgagagacagccgatagagctaaattgagatgctaggactagattaacatagacatatgataaatagctaggcaaatatattatccaaaccagagtaatcgaagaggtcgaatgtcctgatgcagtcttgaacgatgccgacgtaaacgatacaattgtctggaccggcggaacattggacttaccccttagctggagatcgaacaccgatgcagccccacgtcaggtgccaagtcccgccgaacgataaaataaagtagaaaaggtaaaaggtggcgatgcgccgaattgtattgatcgtagcgatagattacatagaccccgggtatacatatttatacctatgggttgatacaagtccttgtcggacaagaaagaaactttcctaaagataaaaggaaaagataaagtccttataggacactaaacacactttcctaaagataaaagaaactaacaaactattcctaattaataaataacttgccatgccgcattctctttgaactcggtctcttctggataaacttcctttagtagatcaatttccttaaccgaatatagcaagaatccgacaactgacgacttgaaaactctcatcggctaatctcaggacttcgaagccgatgctgactctaagccgatgactactctgggcttaccaaatttcactgttaatagaatgacatataggtcccacatatgtttttatttttttattctaataccacgtaagcgccacgtaggacaaaaacttggtcaagaccggccacgtaggtgccatgtcagccaaaaccaccccaaaaccaccgagggatattgtttgcaccaattttaatagttggagaagtccatatacccggttttttggttaggggacgtgaatcatactcggtcgatagttgagggagtccaagtatactttttccacgaacatacatgcggggcaatttaggccgaaacgggatcggcatgtgacgtcggcccacgggcgatttctcgctgggcccaatgctctcgggcgctgctgcctctgctggtgtccgtggaaggcgcccgtttgatgtggtctcgtgtttttgtctgcctgatgatccgtggaccacatcgatgccaatcatttcaagatctgatgcttcatagtatcatcatatgcaattggggttgtgtaaccggacaatttcacaggcaggcagtggggcctttgatcaatctgtacagcctgcaatgcgtgtcctgatcttgctgtagctgaatagtgtgcgtctggctactgtttctgagcttgttttagggccttgctcatgtactattttgtttgcgggaacatctgatctgatgcgaggtaacagccttttggaggacatcttgagctatccatgattgaatgctttgcttggggagttgaacatggtatcgatgaaaaaaagagaactgctttactacgtgttagttaaccactcgtcggtgttcaggtggatgtttgcaagtaaagtgatcttttataatgaaagtataaaaggccttcgtcgttaggaattactcgatgtgattgatacgaggtacttggtgaaatcatcaatcatatattgttaagaactactccctccgtctcaaaaaaaacctaattctaggtttgaatctggacatacactatatccagattcaaacccaggattgggttttttttggacggatggagtaactaattaaacataattcagttaatggtcccgcccccggccccccgcgtcactcatgcgcaagcgacacgggggcaaaaccctaccgccaccggcaaagctaggatggcggtaacagggcctccacgatgcggcgcgggggaagcgacgttcgccggcagtggtagatccggccccgcagccataagatcttctccgatgacggcggcggtagacgcgatgtagaggcggcgtgtccggcgcgtagcggcatggtcgatgcggctcgtggtggccggcagtctagcgcttgggtggcggctgatggtgggcagcggcttccggcttcgagtcggcagcgcgtcgaccagcttggggggggcgtcggttcttccgccacccctccccacctcccaccccctatgaaaccaccattcttctcttcctttctctctgccttcctttctctcttccttcccctccccctagtgctcatctctctgtggtggtggtgaagtcgcaggtggtcgctgaagttgattggtttgtcccgcgaagcccggagttcttcgccggaaatatggttgacaccgatgtctatgtgccctctcttcatatctcagttcctctccaggccgaccatgcctccttggtgccccctccattggctatttgcttacagatctggcagtgctctttcggtgcttgaggagtttgttcgtccgcggtgttggtcttgtctgtctgtagttagggctcttaggcctcgttggtgctggctgtgtgaacttgttgaagcgccaattttgaagcggtgtgcttacctctatggtgcgagagttgtttcctcttacttcttggaggtcctgcacttttgagtgagtccgggggcaaaagccctgcttagtcgtccgggatcggcaatatcgacgcctgccggtgctgtttcctccttggaggtgttgccttgtggactctcccctccttgtgtgaaaacttagtccagctgatgggcgggtgtcgacaacggcttatgtcgttgttcacctccttggaggcttcgtcttagggtttttgctcttccctcggccttctgcggtccgtagtcgtttttgccttcaggctttctgtgtctctatgtgtaaggtttttatcggttttactttagcaaaccgtatagttgtatagtttttggtccggtttttcttataaacagggtcaactctattttgtaatatttgccgcttccacttaaaaaaaactgactaaaagctgtgaattgtttcagtggtcaaaaaggttattacacgtttggtgtgatggtggagaaatggtctactgcgcgcatgatttttagcttcaacggtggtaatgccaacgaaaatgtaaccggtcagatactccgaagctgcatcctaaatgcaggtcctctcactcactggccactgggcctgagcactaaatccacattctctggtcccacacctgtcaccgtcccatccccacctcggccacagagagtacagcgtaatcaacacttcaataacaacccacatttccacaaattgataatccttacgcgggaacgacgaaaaaactctttcttcagctaccatttcgaccctgcagtcatctcactgacgggtgtgccccaccagatgtgggccaccctatatttattcgaaatttcgaaatcaaatcggtgcgagcgatgagccgatgagtagagtagttaacggttaatcaggagcacacataggagtatactcgagcgaagcaccgcacccgccgccacctcaccgcccgacgacgacgacgaggccactgcgcggtggggcccacatgtcggcaccaaaataatttcgtcttggtctcttctccctctcctcctcgccttctcctccccccatttcgtcggcctctctcgagtcctggactcctccctcgccacctccccaaattagcagaagccgcgcaccacgcgcacgcgcacgtccgcgccgaggaggagctggcctcgcgcgctcttcgaggagagaccgcgggggaaaccctagaggctgcgccgccgctcgccgccggccggccgcggcgggtggtggggcagggcctgacgacgaccggttcaacaagcagtaagatctgaggttttgggggtgggattagggttgttgccggggtttgtttggtgttgcggcggcgccgcggagggggttcatggcggggtcgaagtttgggtcgttcaagtcggagaaggggagctcggcgggggcggcggcgggggccggagcggcggcgcagaggagggacccatacgaggtgcttggggtggggcgtaatgccaccgagcaggagatcaagagcgccttccgccgcatggccctcaagtaagtaaagcttcttggatttggtcacttttgagtgctgttgttatgttcgggagggaaggattttgttcaaatttctgaagaacggagtgcactttttggtcaaattggctcactttgaataaattcatctcctgtaacaccagcacaagagctgttcactgagcttttagaaccgtgtattagattcaaacaccaaaccaaggcttctcctgtctcatttctggtaatggaaatgggggcctcgagcccttgctcaaaaagaaaaaaaaaagccttctcctaccttacgttcaaaaagttggtagtatgctggtactttgctttgcttgtgtggtaattgttgcagaacgactgagcgataatgaagtgagttttttttttctgctttttggtactgcaggtaccatccagacaagaatgcagacgaccctgttgcctcggacaagtttcaagaagccacattctcttacaacatactgtcagatcccgataagaggcggcagtatgattcctcgggattcgaggtaatttatggcatacaaaagcatgatgtttgatctgcttgattttgtctgcctgtaatgcttttgttatctttcaggccattgaagcagatagtcaggaactggagttggacctgtcaagtctgaacactgtaaatacagtgtttgctgccctgtttaggtaggttgttaaggatagccatttactttgatcttacttaatcgattatttaattatgcttatgtttgtgtagcaagctaggtgtaccaatcaagaccacagtttctgcaacagttttagaggaagcattgaatgggtcggtgggaatttcccaactcgagcttggccagtccgtctttaggaaggtattcaactatctcccataatttactttccatttttttcctgtcagtgaataatgtttcagatttcacatattggcaggtggaaaagcaatcagctcacttttattctgtggacataacagataaagaagccaaaatggggttagtgtgtagagttcaatcaactgctaaaagtaaattcaaggttagttgctaacttgttgttagtgtttgtccgttatgatctttcgacagtaactactccattatacaactttgtctgatgagcattgccgcctcctagttgtatgttgaaaagcttagctgactttagctgttactttctattttctcttctcaacaacaagaaatgtggttgtgatgtgagctgttgttcttgaaaaactttttacggccaaaggtggcaatgttaattgctataataatgaacttggtttagccgtctgtctgtttcttctgagattgccatgatatctaattatgatattcgaaagtaaaaacaatcaagtacttgatacatgtataattatactgtaagtttagaaagttttgccatgcacagattctaaggtaagtttctctttctttcagttgctatatttcgagcctgaagaaaatggtgggttaagccttgctttacaggtatgtatagtctgttcttatattttgctagtcctagaaacaaactaaaaatgggttacaaaaaatactcctatttgggactagcttattatctgcgtaagtttctagcatgaaaatccaaaacacactgagttggatattgttttgtcacggggtcatcctgtaaagtgtttatgcaatataatccacagcacattctggttaattgacaagtttgaactatttactctattttttgcacaagccagagatatacctcccttttttagaaccattcctaaccctatgttacaattggctggcacttctttttctgtgaattttcctgtaatcttgagtgcaccactactccactagtaacagttgacaaactattgttccatcacaactgtggagcaagacaaactcagaaagcctcttggtagatgtatttggtgactattctttctgtaaataaaatacttaagtgagccttcattctcataatatagatggaaaactttccatattggcataactagtaaacttcgaatattatgattttgtgtagtcaatgttgcaaggatggcctgtacgatacaaaatatttactgcctaatgatgcctttaggaatccagggtcctcgacattaaaaagcttttctctgtttagcttaacctggaaagatgcttcttgtttatatgtggttttatgcaccatagaagattagtttaaattagcagagcacttgaaaagacactagcatgacaaattcaggtaatgaaacgggattaatcctggttatgtctgcgtgctgtattcaaacatccgcaactgacatcttttgccgaaggccttccaagttatattattccctttgaaataaattctggtctgtgggattgactattaacatgttgctttgcaccaatactgctttttcatccaattttcattctatccagtacccaatgacaaggatttgatatttttattgtgctagtcttttgatgttttgggcatggtttcagctaatgtatcatgttagtgcaggaagacagtgtaaagacagggaaagttacttctgctggaatgttctttcttggctttccagtctatcgctttgaacaaaataattcagtgagtatgcaagctattgtctggctacctctctatgtttttgtttttggtgcctctttaccagctctagttactgccaggttgctgctgcaaaggatcctgatagtgcattctttaaaagattggatggctttcaaccatgtgaagtaaatgaactaaaagcagggacccatttttttgctgtctatggtacgccatttattttgttgcttgtattagtttgttatccctggcggtgtacaatggctttaaaaagatcagtcacctcatttaggtgataatttcttcaagagtgcaacctataatatagaggttgtatgtgctgaacccttttctactgaaaaggagaaactacgatgcgtggaggcaaagatacttgcaaaacgatctgagctgtctaaatttgagtctgagtatagagaggtataatccaaccttttaaattgtttgtgtccgcaaatccaagagatagttttgttaatagctgaaattttcaggtcttagcgaagttcaccgagatgaccagcagatacgctcaagaaatgcagacggtactgtttgtatttgtgaaatactcctagttcatttctgcttctgaccttgttctgatatcatgttttctttatagatcgacgagcttctcaaggaaaggaatgcaattcatgcatcctacaccaacaacacaactctgcaacggagttccagtagcaacaaagggaaaacatcctctaaagagtccaaaagtgatgatgaccaaactgtgaaaaaggaaaagaaatcgaagagcaagtccatggagggatccagaagtgatgatgatggtcctagaaaggaaaagaaacctaaggaacgacttcgaaggaagaaatggttcaacatccatttgaaagtagacaagagaagaccctgctgaggaaggtagtgtgttatttgataataacatattttgatttgaggtagcttctgcagtatttagttatcttcctctgtgatctttaggtattccctgcaagttactactcccaggaaatggaacccaagggagttgctccgagaagaaatatctttttctttgtcgtccactccatgggatcaaataggcaggaatctcagtttgacattcggaaagacaccctcgcaaattattttttctcctgtgacgtaacattttgtttcctgaaaagtcaggagcctcggcagtttcagaaatgatgtaaaatattacatgtagtgttcttttggggatcttactggcgctgtatccgttcacccggaaccaagatggttaatgatgtgtgtatacagcttcaagaaactgtcttatgttgtacactgcagccagaatccaattcagattcgttcaaatttttaggtgatggctacgttgatcttttactacctggcacttagggaaatgggcaagttatgatcttatatctacgcaatcgattaaacatcaataattgagccattttgcatgggcatgtcatgaattatgatatgcttagcataacttcttcagcaactctgttttcattacttcatttaaaattacttaccattctagatttatcctaagttaaatatgtcttatctttatctttgatcattaatttttaaaatctgtatagtttaacagtatttcaattatatattatgtaagtattgcttatgctgaatctaaaaatataaacgatacgatgttaaattatataaatttatagaaattcatgatcaaagattaaaatatttgatttataacaaacatagaacatcaagtaatttgaaacggaggcagtgaaaagtttctaacagaacttcctttcctatcttgtgaagttacacatttctgatttagctacatgtcatagagagattcagtttggctggtttctccatcaacatactcaacaactgccgagctaattaataatcattgcatttacgaaaaagtgaaaaacccggagttacaaatgaacgtccatggttaactcgaggaacgttaatggagctgaaaacggcaatgcaagggacaggttttgaaccagcactgcacgttttttgaagcaacccgtacattagtgcaacgtttctattgatagagcagggaaaaaaaatttaaagtctataaccctaaaatgctatagccagaaatagaaaaaacaatcacaccacacgtttacaaccagaggctgctactgaagggcaaacggacactaacacccctacttaaagggcaaaccagcattgcacgttgatccagaaatagtacgtacctctcctcttcttcctcctctctacgacctcttcccgccgctccctccccctccatttcctcttctccaccgcctccaagaacagcaaacccaactcctcccccctcctctcctcgcatttcttcgacctgccattccacacccgcgcgcgcctcaaactctatgtgagggaagggaaacaatcgacttcccagctgagaaaccaagaagcagcagcagcagccatgcgtccgtccttcctcctcctcctcgtcgtgtttgccggcgtcttggccggcggggcgcgcgcggggccgccgttggcgggcgagaatctgccggggcagctgttgccgggcgagaagccgccggggcagccgttgccggggcagccgttgccggggcaaccgttgccagggcaatcgttgccggggcagccgttgccggggcagccgttgccagggcaatcgttgccggggcagcctttggtgggcgagaagccgccggggcaaccgttgccggggcagccgttgccagggcaatcgttgccggggcagccgttgccggggcagccgttggtgggcgagaagccgccggggcagccgttggtgccggggcagccgttggtgggcgagaagccgccggggcagccgttggggggcgacaagctgtcgccggattactacgcccagacgtgcccgcgcgcggagcggatcgtcgcggaggtggtccagtcgaagcagatggcgaacccgacgacggcggccggggtgctccgcctcttcttccacgactgcttcgtcagcgggtgcgacgcgtcggtgctggtggcggccacggcgttcgagaagtcggagcagagcgcggagatcaaccactcgctgccgggcgacgcgttcgacgccgtggtgcgcgccaagctcgccctggagctcgagtgccccgaggtggtgtcgtgcgccgacatcctggcgctggcggcgcgcgtgctcatcaccatgaccggcggcccacgctacccgatctccttcggccgcaaggactcgctgacgtcgtcgccgacggcgcccgacaaggagatgccgcagtccaacttcaccatggaccaggtgatcaagttgttccaggacaagggtttcacggtgcaggagatggtggcgctgtccggcggccacacgctgggattctcgcactgcaaggagttcgcgcagaggatctacgactaccaggggaagcccgggaacgtggacccgacgatgaacccggtgctgagcaagggcttgcagacggcgtgcaaggagtacctcaaggacccgacgatcgcggcgttcaacgacgtgatgacgcccgggaagttcgacaacatgtacttcgtgaacctggagcgagggctcggcctcctcgccacggacgaggagatgtggtcggacaagcgcacccagccgttcgtgaagctctacgcgtccaaccccaccgccttcttcgacgacttctcccgcgccatcgacaagctcagcctcttcggcgtcaagaccggcgccgccggcgagatcaggcggcgctgcgacacctacaaccacgggcccatgcccaagtgatgatctgatctgatctgatccgatccatcgatcgatcgatcgatcgcccgctcgcgcgcgcccggtttacgaggacgatatgatcgtcatatcataattaagtgattcgctaaatcgattgtttttcgttcgtttttgtatttgtatttttttgttttgcgtgcgtgacttatttttcatcgttggtttgttaacattcgtgaataagctagatttgtgtcgagtactcgagtttcctgttcgattcagtaatttaatttctgctcgtacgagaactggaggtcactctctatgtgcgtgcgtgttgtttatttgtacaagctgtttctttttcccctttctctggattgatttctcctgtatcacattgcttttgaatcaaagttccatttgagtttgtagcaatataaaccattgtttagaagacaaagtatttttcgatgacacaccaggcaaaatgatattagttcaaatggacaaatcaaagtttttcatgagagcaagtttaataatatagctcactactagcttcaaaatttaaaacattatttatagtcaatctaatatagttcactcatacaatagttagctgcagaaatatactacatcattaatgtataatccacacatctctctcatataatttattggagctcgtgctgcagttggctacaaatctgtagcccgcttatgttctctctcctctcatctctcctccacgcaagcacaaatctgatgtggcaacttatatacttcctctggtagaccagaccattgtcgcctgcaatacatccacgtcagaatgtgcacgttcttttgattggttggtttctgtagaagttgcgtcactgtatttcctaaggcggcacaatgctaactgcacaaggtttatgttgaaagtggatgaaattgattggagcgagagagaattgacgacacaatagagcgaatgagcgagcgattctttatcgatcacagtggttacaatatataggggggagagagaggcgataactggagacacgatggtttgagaaacattgcgcccattgccaggatcgccacgagagtgagaagacgtggggcatgacacaactgtcgtgtccctgagttggttgccgatctatccatatatatgaatgagatcatatatcttgttccacaacagtttacacaacacatgtaatataccattgtataagagacctgaaaattcttaaaagacggtgtgtcctattctaaatataataatcgttaacctttcgatcatcctagcctagacagttcaaaaatattaatgatcataattaaaattattctggtcaacactagaaaatatttatgaactgtggagtactactatttattagggggaacttttttttttctcatttgttcgtcttgtaagtcaaaaaaacaccaatcaaatagttataaaagtctgaaaagattaacaatattgatactctcgaaaaggccaattgagatgtaatatatagaataagaaacaaacaaacatataaattacacaatgagtaatacaagtacattattcatagttatattcgcttattttcaactggttaggtcgactttaaactttcacctcaagagtttagaatactttcctgagcaatatattatacaattatctatgttatcaaattttaattttcataaacatctacatgacatgcaaagagttcgccggtgtgtgagcgcaatgttgtctgtataatggtgtgtgtatgcatctactgtgtaataagaaaaaacacatccccttatggagcataatgaatttcgaaaatatattagtatagttttttagcacgtatatatttcattaaatattaactttcactaagatcaactttaagaaaatgaatatgtacagtataatgtactgtagttgtgtagttgtgaaagatattgttttttttttggtagagaggaagtacccactcggccactccgtctccggccactccgtctccaaaagtacttaattagccctgtttggaaaatttgcccatggctaattttgagagctaatgtttagtcatgaattggtaggttaaacattagtctagggtggtatttttggatccatgggctaattcaaagctaaaaggtggagagagagtagaaagagaggagagatagctgcttttttatggtccttacataaaattaaccccattagcatctcttggagaggctaatgttttgaggaggactaattcactttagcctcaaattagcccacctgtttggattcttgagccctaattcagggctaaaaggtgggggctaataattagtccatggaaccaaacatggccataatctagtacaataaatctgaacatgtttatagtagattatgtaccatcttaattttagattgagttttttttttttttttttacggaggagcgagtatagcgtttccctacctttttctgtggcagactattaccctcgcggaaaaagagagggagagagggagagagagagagaccggtgccctgtagcaaaatctcggaagcaacgagctgtctggttcggatcgaacgaactcgcccgggcccgatccccatccaacaccatcctcacgccccacggcaccgcaccccgcgcgaaaaccccatgcgacctcctccccggccgcgccgcccagtgccggcgcggctcgtcgccgctgcggtcctcctctcggctctcgccgggggagccgcggcgggcgccgccatcgccggcgatgggtacgggcgcggcaggaggctgtacatgaggaacaaggtcctggagatgtgagtgtgctcgacatgccataagctacatgctcagatgctctcttgacttttctctctttcgttgcgcggtcgattggttagatttttttttctttttggttgtggctacatcgcggagaacgaagacatctccgcacttttgttaagcctcgtctccacttgttcgcgaggtctacgataaattcgtcgtaaatttagttgaaaggatgcaaagctttgttcaatgtgttgagacgaatgcccccacttcgaacttaagcctgtaattgtaaagaaggcacgggtttgctatagaaggattgagaatggggtttttgattggataatgtgtgtgtgcccaagttgttaagtattaaaaagtttcatgttataaaacaattatgagaaagttgtcatctcgagttaccaaggattgctttggttggtgtattgtttatctgatgttatctcgagttaccaaggtatttcctgaaccttttatcaacaaatcactgcattaactctgtaaaatagggaaatgctgaaaatctagtctaactttgcatttacaaggcagagtatagttgccctgactgtccaacagggaaaacaaaattgctcctaggagcattggcgttatttatgatgcttaagttattctattatatttggtgtctcaaactgagacggtttgaaccatgcatgcgcctcaccaaagtgttcagcctgaatgctctgcatatgaaggttagcacaaaataatgccagcataaaattttctatccacatacaaaagcatgcgaaggtaggatctcagctcagtatgatcatacattagtattgtggcgctatacttagatcacctaatccaccatttgcacattactgcgtcttgcaatgtttattttctattactgattcactaccattcttttcaggttttaccatgcttatgacaactatatgacttatgcatttccagtatgtccatcagctatcttaagaattctcacacaatgttcagttcgattaaacgcacatgaaatagtacaagctaacattattctctttatcttttcagcatgatgaattgaagcctctaaccaaaagtttcactgactcccttagtgagcttggcaacctaaatgtattaaagtatcaacaagtttgcaaattttaattgaaattttaaaagctttgagatagcaggtcatgatgtcatcactttgttccaacttgtagcttgaacatttgccaaatgattacaatggatctgcacttacactagtcgaatcgttgtcaaggtacagtttatgaagttgtaatgtttttcactactttgaatttggttctgtacttctgtctttgctgttcagaatgtgaatgatgatatagtttcttcagaaaacactattattcgcaaggttgataggtaatgcctctctgtttggctcatgcagtcttgttgtcttaggtaacctcacggagtttgaaagaggagttctctggctttcagagaacctaacatttgatgttgatgctcgaataaatctttttgaggtaatgctagctggttactaccacaggttttcacctaaaaatgacatgttggcctcaggacactgagttacacatgcattttctcttaatcttatgcagtgcaacataagacttcttggggggcttatttctggtcatattcttgcaaaggagcacagcagtcatcttaaagatggaccatatcaggaccagttactacatcttgctgaaaatttaggaagtcgttttctaccagcttttgagacacctactggattgccatacgcatggatcaatcttaaggttcatttacaaatcctctgatcttgctatttcaaaggtggttaatcagggtaggcaatattagaattttaatactggcaaatttcagtttgtatttttacgcaaggctacttgaaaaccatcgtagaagatatcagattgagaaaggaacctttgggttttggaggcaatagctcacagctcagcaaacgaaatgcgtttagtttttactccaatttacagaaggaatatttctagctaaatcagtgatgctcatcatgtacagtattgataataactactttagaagaactaaccaatcaggatgcttcagttcatgccaaaaaacaaatgactgaatgagtacgagtcttgcaaagaacatcagtgtcaagctacaaccacgaaatgttttccacaagtcgtgtattataattttactatattatatgttatcgagagtttcttctaattccatgaccatgtaactattttttccagtatggagtgatggaaaatgaaacaactgagacaagcacatcagggtgtggtgggtgatagaatgttctactgtattccaggggaaatgcattactcttagttatatcttactattttgtaatatacatttttacaggttctctgattcttgaaatgggtgcattatcacgtttgacgggtgattctagatatgaggctgcagctcttcgtgctcttcgtaagttgtggagcatgagaagttcactaaatcttgtaggcacaacccttgatgtcttgactggcaagtggattgaatattcgtcaggcattggtgctggtactactctttacattttcccatgtgatttactgatcatgtgtttgtatcctgcggtaagcatcttgtcactgcacaacatacttttgagacataataatgattcatttgtatcatgtttgcaggagttgattcattttatgagtatttgattaaagcgtatgttcttttcggaagcgaagaatactgggatatgtttcattcagcttaccttgcagtgcagaagtatttccgacatggcccatggtgcacccttttatttttcttggcatttcatctcagctaactggcctgtcactgtgttgtgattgtaccaagcactaatgatcatctggcatgataggtatcatgaggctgatatgaggaccggagaagcaacacactggcaactaactagccttcaagccttctggccaggtcttcaggtttgctgaattccataaattgatggacagtcaccttattgcaggattttaatcatgcattgtttatctactcctgtgatcatgaccagacacttctaggagatgttgctgctgcaaatatatcacatcgtgaattttacaatgtatggcaaaggtttggtgttctgccggaaaggtaccatttactgtttttcccacatattagtaccatcatctttaatggggggaaagacttattatttaagtgataaggcaaaaagttgcttcaagattgatactaaactgtactgacacaagtttcggactgtattttgcagatatcttttggacttcggaatgttgcatcctacagagaagtattatcctttacgtccagagtttgctgagtctacattttatctttatcaagcaactaaaggtttgctcaacaagaaaagccaaaattgcagccattatatctagctagatttcctatacatagaagccattagctcttctccttttctgttccctcattctccttccccaggctgacatatgctcttcctgtagatccttggtatctagaagttggtgaagctatcattggatcccttaattactatactaaagtggatggaggttttgctagtgtcagggatgtttcgacaatgaaacttgaagatcatcaacatagcttctttctttcagaaacgtaagctgttgctcccttccaattatttcttaaaagctggtactaagtatttagtcatcactggtactgacgactgagtcacatgacaaattatttgcagctgcaaatatctttttcttctctacgatgattcattcttgaggaaccaaaattacatatttaccacggagggtcacccccttccaataaggagcacatggcacgagataatcccgacaacgcatgttcccagcaactggacattcgttaaggtaatatcccagtttctgttcccagttcctccttacttgcatgaacaatgataccaaaaacttatcttcaggatgacagccaacccttccgtgtgagcgcattgtcgtctcaagtttgtccagaaacgattttccggcaaagcgttggctccccgtgggagagtgcatgccatgtaccagacgtgttacctacccacagatgcaggaccgatgatgactgtggagtggaggccgtatcatgcaggagaagaacttgcagtatggctggctactgcggcttgtggctgggggtttattagcttttttttttctgtggagattatactgtttcccattctttaaagcacaaaaaagtgaacgttactggacggcctcggcctgttacttctgtacattagaatatatatagctaatcgaacagaatgatagtagcaaagtcgttgtcccagttgttagcgcagaatgaaacatgtatgcaaattctcctaatgtattctttgctgatgtaatcttttgatttattatcaatcttccactccataaatatattaggcaaaattcttttgccatgcttttaaaaaaaacttggattttttttgaaagagaacttcgatttattaataatacactgatgtgtctggctcgtctcatccgattttacttttacaaccaaactagaggctgtagatcgacgcggcttttgtagatcctgggtgcaaacttatctcaaatgtaggggattataggctatttttcattgttcagatctaattattggctttaatctattcatcttttgaccccgagtctactagctctgcttagctatgagcaatcgtgaaactgtagccttcatcttattatcgtccggttcaaaatcatttactccgactaacattcagaaatgttcagttttctacagtcaaattataaccgacattcgttagcaaaccttgtacgcatttacaactcagtatcaacttacgcagcgaatcaaaaagaaaaataaaaatcagcttacgcgctacgaatgcttatatcatctttgtcaactagagttcaatttaaatataggtcatctggcaatccgcacgggcaatgagaacattttaataagcgctgcttagccacatgaatttgtctaagcagagtaacatgtacgctcgcaattctgatagtgctacaaaatgaatatgatgccgccctgattcagtatgtcctttgcaaaaaactagtctccgcgcttgagcaaagacaaacctaaattctctacgactgaccacgcccaccacgaccccgtgttcctcggccgccatctttctgcacatagaaaacattgttctccatcagaattaacactggatataacaaaaatagaacacaacagaaataaactcagtagtcttgtagtataaaaccataccctgtatgtaagagactggttgccacggccccttgcattctgttgagtggctgagcgaagaatcctggcttgccggttttgcctcgctctctcagttaggttgattgttctggtactacgagtttcaacaccttctgctgcagtggcgggattctgctgttcagaagatgcaccagcttggactgggttaggaggggtgggattctgctgttcaggaggtgcaccagcttggactgggttaggagaaggttcacgtgcagggcttggtgacgcatcagccatttggctcggtgacgcatctgctccaccagattgtggtacagggctttggtctgattccatggtaccatcaccttctccagtttcttctggcatgtcaacatcactcttttcagttggtcctgctggagatgccgccctgaaagaatcaccggcttgctcaccaacatccagcacagggggagtgctgtctggttgttctggttcatctggcaactctccctcctccctctcatcttcaacatcagtggttgcagtaaactgaccctcttccttcccatcctcagttttcaggtcttcctccagtgattccataaccgcttctgacttgactggcacatcttccacagtagttgcatcattatcaataccagtttctgcatcttgtccttggatgtccattgaagcgtctatatgtgtttccatgtcatccttatcacccaagtcatcctcccttgtttcctcaacctcttcaactggcaaggaagactgatcggtgtccatctcttctccaggctgttgctcatctaactctgtagatggtagcacaggaacaggtgccatgacatcttcatgaggtgactgttcagtttttagctcactagtacattgtgaagatccttctttgggtttcttcagtggtggattggcatccgttgtctctccttgtgaagcatcatctctcgtttgtggtgatggaattagacgtttacgacttgatggctgtaacgcagatacaccaccaggagtttcacgctccatcaacaagccgcctttctctgtggaaccttcaactactgttgtatcaatatcagcttggggttcttcaactcgttcaagtgaaggtcgaacaagtggtctccttcctcctggtctacgtacttcagtgcttggtttgggcaaagtagaaactgctctctcctccaccactttaacttgagcaggccttggtggagtagctacctgtctccctgagattagaaaaaaaaaaaagcagcagccttatgaactaccatattgatcaagtgacggtaaagcaaaggaaaaacacattattcagatccacgcgatggaaccaatgcaagaaaatgatgcattagaaatccaatatcatatcacattccgaagtccgaacaatatctgacatgccaaatcattcaaaaccaaattcacatcgagttcaagagtacatgtaatagatcagatctaatataatttctgaactagtaagtatcacatgtcattaacagatactatgattaactaatagagatcattaaatatacactagcagcgtggaatgaaaaattgaacagaaaggaacctgcagtagctgcagatgcatccacatcggcactttcaacagatggtgtctggcttgctgcaccatcttggaagggactcggagactcctcaacagctttgatggcaaggaaatatgaacgcagctgctcatcgattgcagatccagatgggatttgagaggatattccagtataatgctgcagagaacgcacatcagctgtagcaaagctctaaataaaatatactaggaactttcatttgcagcagcaataatgaaacatgaaatctatgggagcagataaactgtacctcaatcacctctttcacagcctgcctatgcttctcaattgattcctctacttgtttcctttcctgcaattaattttcgaaagcaacaagtggattagagggtgcgcatataccacacactaaccaggcaggacagattaattattggagaaacaagcaactatgaagttgttatgttgcatttttaataggtacacatcatgtatcattaggtaacaaatacgagtaaatactaaggaaacaggttggagcaagctgcaatgcatgctaactgatcattaagggctatcacaggaatgggacatggcctgaaaagccaataagcaaaccccagacaataatttactatagtgtactataattgcctgtgatcatgctaaacattaaccattagcaaactcaaatgatgctacatttgcaagctttaaacagtgaaatttcatattctaagaaatcattcaatagaagaaaatgtaacgaaaagtgtagatcataatgataggcttaatactcagggttggtttggcaatggacatgaacacttagcatttggtttatagcccaaacaaactatacaaaaaaattggcaagggcaagaaaatgtgtgtgtttggtttgttgccatagattttgtgttgccaatattttggcaaaaacaatcaatacatcacaagcaacattgacaaaaacttggttataaaccaaacactcaaactttaccaaaatttggcttgccaattttttggtaaggtttaaaatggcacttattctttagaacattcataatgatgccaactttccaactctagaatacactaaaacatcctacttaaaagtttcatcttgtatatcccagaacacattaagtttttcatttttctaagttcatctgtgaacatgtcaacatatcaatctttcattatcttaatgtctacttccttggcttttcttattagaaaatctactgcatcggttaaaaaaaaggagaaaatttcacaaactacggatttaagacaaatcacaaaactatacatttagtgccaaaactagggaaactattttgatccctcgagggatgtccccttgtttgcttaaaaaccatccaaatggttatgaaaaattctggaaaagatcgacaacactcatacaacataagtatacaactccataaaatcttaggtccaaacgcaacgcacacgtcgagagatataaatagtaggtcgaatttttttcataaatttttacaactatttgtatcgaatttgaaagaaaaaggtacacgacgggacatcccctcaagggattagaatccactcccccaaagctatcaggtacagatttagggagaagtatcacaaaactacagatttattgctcaagttataaaaaaactacagattttagattttcaatccctagcactacagttatgttgaagatatagacgttgtagttttgggattaaattggcaataaaccagtagctttgtgacaaatttgctacttaatgtgtagctttgtgacaatctgtattaaatcagtagttccatgataaatttggtgctcaatctaaacccaactgacgataaacaaaaaaatttttaagacaagactgtactcaggctagttgaggaagaaatacctgattcatattttgaatggcggtagtaaatactttctcattccttctgcggaatgctttttctttcttattatcatctctctctttctccaagactttttccaatgtctgttaatatatgtttatgtaagaaacctgaaggagttcatgttcataaaaatcacaacctcctgacctgtatcctgaagtccttttctttgatggcctgttcatttgaattttctgttgtagttttctgacctgctaaagtatatcaaatttaaaacatgagtgatcatacaaaatatataattcaggtggttgtgtgaaagtaataagattaattaagtacttgatttgagatcttccaattgctttgaaaggctttgtttttctttcgtcagttcctccttctcttttgctgatgcatcaagcttcctctacattatttaataggatgatataagcacatgaaaacagcaatgaactttcgatcttgcaatagaagaacaagggaaagatcctaacctttatgttgatattaatcttcctatgtctgtcaatttcagatttaaggctagcctgcaaaaggaaaggcattactaatacaactaaagtaaaaatggccaggagaatgttactggaaattatatcagacctcaacatcattcagcttcttttccctagcatccaattcagactgacatccagcaagcttttcctccaaatttcttattacagaatccttctcagaaagaagtttttttgtgcgctctagctctgccgaattctctctcaaggttgcctgttgtatttaagaaatacatgtgataatcgtttatcacaaaactcaaccttacaaactcattaagttcagtcgtattgaccaaataatgaaatttaagccagccatccatgctaattaagggatgtacatcagtatcagtgttatatatcactaaggctgtgttcgttaatacaggttgagaacttatccctcctgcatggaaaactgggctactcattagagcatgattaattaagtattatttaaaaaaaaagttgaaaatcgatatatatgtttttttttcaaaaacacactgtttagcagtttgaaaagtgtgcgtgtggaaaacgagcgattagaagttgagaaaagtgggaaactaactcaactgccatcaataattagaaaacgagcagcatatgcgcatgaaagggcataacaagtccaataccagcgatagccgataataattagaaagtatgtttcgcttcaaaagttcttattccagactatattgtctgtcccctccctctaattgtctcaccaatggtcattttccctattctttaccgtagctatctgattccaagcttgaactaggttcagaaccgaatgcttcattaaacagttgatctctagtcaaaccagcatacaaaagaacaaatgtagtattattttatcagtactctcaatgtcccaaaatatagcaacttcacctactcccccatcccaactaatcacaaccatttctcatctaatttctctacttgtttcctcatctcaactaatcgcaaccatccccaattcaatttcacctctttccttaatccccaagaataccagaagttcttatatcttggatcagagtacaatttatagaacaaaaaatatgttcagaccaaattcaatcaccaaaagaataagtataacataataactaaaaatacttatcaaaatgatttgaaaagataaaaataataaaaaaaaccactaacttttatgttttgaagttcatccttcatggtctcatatgtgctcaaatcaacgcctctactattttcaaccaactgcagaagaataaagttgacataagagtcaaaacaaaatacctgatagaacaatgataatagcaagcttataacaatgttaataataatgttagaactttgggaaacactagacaaattctattcaagactaactgatgaagaggtaaaacataaactgaatttatacacaatgcaagaacccctgctcgatgtacacaccggcacaccggtctgctgttcagacacccttttctgtgcacatgcactgggcaactaatcctaaagtccctccattcataacaaaaccaatgacagaaagtgaagacacaagtagcaccaagaatatcaagtcagatgtacacaaacgcacatttccacacaagcgctgcctagcttagatgtaagtttcctaaaaaaaactagcatcagcatttgagggtttgcttcctccagttcaagaaaatattttttgacctggcatggtctctatctaatgtactagtacaacattagctgctacagtgctatattttaattcttatttattatttattagaaaaggtcatgtatcaaatgtcagctaccttaaggaaatgctaaccgcatataaataaaccaattatattcatgatgcgttgcataatgataatgggtaaataacatacctcggaaatcttttgatttagattagctatttcggtcttctgcatctctatttcttttttacatatttcagcatctacctgcttttccagtaaaagattatgcaacctttcagcttccattttagccttttgagcctcatcatggaatttctgaacccaggagagaaaaaaaaagaacaatgaagcacatcaaaacatgcaccataaaagaaataaacaagacaacatcaataaacttacctggcattcttcgaaattatgcttgttctcctctctaagctgtatattgctttcacgaagcaaattaagctctctcacctgaggtaaagcatttttaatacaaaagaaaacaagctacaaaaaaggaataagagagcaacagtaaaatcaagagaaagggagcagtcatgacagatacccaatacactctccgccctaaaatataacttgtggcttttttggagagatttaacgatcaacggaaaagactatgatgcccccccccccaaaaaataaataaataaataaataaataaatgagggatagttggaggaatggaggtgagtgaaaagcagacgagtgtttggtggggaaagtaggactatagaaatagctatattctgggacaaaatttaagcactagaaatagcgatattttgaggagggagtcgacaagaatggcacctggaattgcagtgacttgaattcttcatccttgagcattgatgttcttgcactatcagtttgactgcggagcaagtcctgtgcctcctttgtggacttcaatgcactttccaactatataagcatgaaaaaaattatagcagattagaaacaccttaagctgcccccacaaaatcaagcacggaaacggttctaatatcatggaaggcacacagataaaactacatcagacaaaaacacataataggaaatcatatagtcaaaatgaggagtgaaaacaagttctcaaatcatgcaagacaaacagattgaacaataatgcataactttcagttatgtgttgaaagtacagaggcacatgacatgttcatacaagaccagagtggagccataggatcaagttaaatgagacaagcttggcaagcaatcacacaaaggagacaaggccatatggattggttccatgatgataccaaatgccaaatatgatgggtcaaacagtggaaacttcatggaattgtcctatgggcagattaaatgggagcatggaacaaaatgacaaaacaacaaagtctggcaggtggcagttcaatattcgcagtcaccatactacataaaacaaaagaaacagaacagttcctttataattacatacaattcaagtaagcataggtagagttctgttttactccatccacaaaagttagacatatttcacatttgagtttttccaaataagttgtacctatttgtaatctttatgtatttaagacttaaatgaagagataaattaaatgtttgatgagaacccaagtagtcatctaaatactcattggttgcatgcttgcattcactccttgatgttgtagcatccaagataatttaatttcttcatggtcttggtgacaaaagtaaaatgtgtaacttttgtggatggaggagtacagtagttgacgtggcacaattatgggtatttgaacaaataacaatatgcaagagcaagcagatcatacttctatctgaagccgtgacttctcctgtttaagcaaagatatctcggtttctgcctgaaatagtgaaattaccatcagactacataaataacatcccattccaagtagaggaataataaagaagaagaggacactgaatcttatactcactatttctttcgatctgcgcaggtagccaatgacgctatgcaaatcatcttcaccatgtgaatcaatgcgttgcgatgaaagaccagcaatattgcgttctttttcagctaatctaatgtgcaaagcttctagttgattgtgtagaattttattctgcattcagcatttgaagaaaatatgtgattcatggtaacccactgtcatcaagtacagaaaatagcaagaatgtatattcatgtgatcttcacgaatggcaactaacgaccacccgtgtttatatacagaacggaaggacatgcaatggaagcaaacaaaaaatatgaatggcaaccaactacaaccagtaaccattctagattatggtttaaatatgctgaacatcttttagaccagaaaaacaagattaatccagcattatcttgccaacgaattaagcatatactagtacaatcagttactgtagtgatatactgattttgtaaggcagtgtttatattaaggctcgaaagtcgaaacaggcaactgttatgaaaatagttatcaagcatgttaaaaaaaacaaaaaataagcccatgaaaccctagtgtaaagcaccatgtagacaagtgccttattaaattttatttgtatcattaaaaaatattcatatgtatgttctcaataggtaggtataaaatacatacccctcaaaatgtgcatgtagaagtccataaattcgacacccatcccataatcaattaagcattatagtaatcaaaccaatcaattctggttcctatgccaaactaatcccagtaattccgaaattgtggttggaattgatagtagtggaatttgcacacaatattttgtggaaaatcaggattcctctcaaatcaaaatttgtgttttgttaacgctaaaaagagtatataaccaaagatcgctgtgtagaaaaggattggaaaagatcataaatgccaaaaatgggggtgtcttaagctgttcccgtggttttaacaatattcttcgatatgtgctgcaggtgctagaagaatgggtgtttcattttattctttaaagagaaatgggtattccatttcaaaacagaaagcagatactttgtcgcggggatttcagccatttagtggggctatttgaaatgagttttcctgttagtttctgggttactaactggtacttcttgcagaagtcagaagaaaacagaagcgcgcagcaggtggagcaaagctactagaacaagtcgaaagtgaggttcagtcatggctggaaggaaggaacaacaatcaggatgtgaagtctctggagtatccaccctttttcttttgttgctattgccaggattttgtttcatgtttgagttgtttaatgtcaatgctatataagcagctcccttaggtttgtaaaatcccacttttgctcttggtagtgaaacatggagatcagataacattctaaaaacgtgaatgttttaagaataactggatatcgatagctacaagcttttaaacctgatcatttagctcattgtatttctgcaaggcctcatcctttcctttcaccagctctatcttttcttgctctccaagggttcttagaccatcctgaaaaagtatttgcagtgtcgattagttacaacaaatgatgattagttcctatgaacagctcgatcaggataagttatcactaatcatgaatctattccaaaagcaacataagtagtataggtatagccagattactgctgttatgcacagaatagaaatatcagaaaggtagacacattgaactattcctcgactgattcacccgatttgtcaaaaattgcaaaggttttattgaacaccagcaaagaactagtggtaatcgctaatctgtgtgctttgaattttagatgccataagaccatttttatccacaaaaaggttggatcaacaagtgggaaggtacaaggtgtaacttttaaaagacttcttgacgttatttggttccttgcctggggcttgcagcagccagatcaagcacaacactttagctaaaatgtgaggctatgacaactggggcaagcaccacagaagcgtgtaacgccacacctagcagacctagcgtcataaattaagcattagctggtaaggtttatttctcctaatttaagggtagttcagccacaaataacacatccctttagatctgtccaagacacaaagacttctactcttacacgccaaatgaatagaagttcagacaagagggtcagtggagcagttttaatttacattttcagccttctgtgtttctactgtttgacgaagcactatgatttcctgctgcaaagaagatagctccttagaagcacttgtcagctcctgtattgtttccgattgcagaataacctacagaagatacagaagagatacacacacacacacacacacaataagtgctttcacagcctcattctaggataacacagtatgtacaaaaaaaataattgtatataaacaccaaggagattcattataagaattgcaagtaataagtaagaaggataaatcaatctgaacttgatatacttcagttactttattgtatcatgtacatgccatctgatctttgatggtgatgctatgaactaagttgcatacactagcaaaatgaccatgctttgctatgggtaaaagaaagtatatgtcatagacaaaatatttttttaacaaatatgctagtattacttgtttccttatttgaatatatggtattgacttgattcaaacaaatattagactcgcataatatctgaaattatcagggactagtttgtaaaaggtgcagccaccaccaccactggtgtcttttatagtagcctagaatagcagctacagttcaagtaaaatggtgaaaacatttagcaacatgctccatataacattagtatcactgcaagttgtgattgcacatcaattgtaatgaagcatcagcaccgcaagcaccaagatataagtagaaagcataataacattatgtgttgtttgacaaaattgttagtgccccaaagtacctgacgctcatagttgtcctgagcgctacgccaacgcttatactgctcgtcaagagccctcttcgaggaagccagttcagtttctaatttttcaatctgtattctgttttgaggaatgagaaaataaaagagataacatcaatcgaagaagcatctccaaattgagaaaagcatatgcctgcctctatagggtatataaattgcttacactttctcggaaacttcatttctcaaaactgagatttccttcatgagagaagtggtatccttctctttagcttcaattgcactggcagcttcttcacacttcattatataacacttctccagttcagatatcttggtcctcaactttgtaatctcatcttccaagcttttcttgatagtctcagactgaaaattaaatagaaattcatgtaaatatcaagcataggtagataaggatacagaaagcatttcagtacctcggttttgaaatcctgaagtgcagactccatttgcttcaatgcagattcatttgagtttgcaatttctttgtactgtcaagtaattagagttataatatgacttaaagaggtcagcaaataattgacttctacaaggcaaaatagaaacacaggccacactacgcaagcaccaatgaattcagttcacctactctacagaacaactaagccattataatgacctttcaaaaggaaatatggtgtgctttctgattatgacaaaggtggctatgctagatatattattcatgcatgggccttcaagagaggaaaataactctattacatcacatcttcattatcataacaatccattgttgtttatgttgcacggtcctctcatgcttggaaccagaataccagatatggatatgatctgtatatcactagcatttcagaaattggtgtaatgcatagaatcattgagtgaaaaaggagcaaagaatgacaaaataattaatccacttcaaaccagctccatggaccacaccgatcatagataactagaaaactgttgcatattatgagctaaggtgatcaattaggggaacaaaattatcaaagttgcatccagcatggcatcgacttgacctcagaatgattgatcataacctcgtcaggcttacaagatatgtattaagcaagagggatgggatggctacaacctcaacttctcaagggtcagcatctgctccctaatggtgatgtcactatcaccatgaacaataacttcctataagtaaaggggtaatctttctctaatgggagtgccaaacctaaaatatctcttgtgcacagcgatagatagttgttgaggaaattcagaatattactccttggtgatgtcaaatgataaactaataaatgtagctagtgacaatgtttctaatggtaaaagagcttgatgactccacaatgtaattaaacaatttagcctttcaaggtgatggggcaaactgacctgaagcatgtagcttttatttgcttgagcttcctctttgtacttttccaactcctctttcagctggaaaagctcatcattctcctacagggcaaatttttaacaactgagcattgaaattatccagaaattttaagaccataggatctttaaccatataaaatatgtagaagcatatgatattgtccaaatagcaggaaaaaactagctcacctcagttgctgataagatatcacgaccaccatccctaaaaatggtctagcagaataacagcagtcagctgaaagctaaatagcatgtacaatacaatgaaaaggtattaagaatactacatgcttttagttgtactcccaccatttgcttttgtaggattaattttgtttcagatcaatgcccaagaaataaagtacatttaccagaatatccatgctttcatcaaagaaacatgctactcaattcaatcatggtaatgaacaaattgtacagcaactacacgcatccatggatgctttacaagttaccgcgtgaatgcataattataatcagaattgttacaccagctcaattaagggtgatacagtatataggagagaaggtagaaagtacagagatatttagatgcagtgtacacctatagctaattaacaagagcaatgaaattagctccctacaaacggataatatagacaacaaatttgatgttgatttgtaaagaaaattttaaacatgcactaatgctaaaactaaacgtgatgcatcattccactatttttcatggatatccatgaatgacatttcaattaaaaacgatatgactatttcaatgatcagacaacatccaaagcagaatttgacaatcgtacaaagatatgaagattatgtaattcagctgaaatcatgtgcttcctttacagaacagactattaaacagcttagaaataattgtaccgaaaatcatttactcatgacaaaaccaggaattgcgagagattatcaataggaaattacatacagacagttttatgatgtatggtgctttcaacatcattgtattagatatacaatataacagtgtattagttttataagtatctacctttcttgattttagttttgtctccaaatcagaacactttgcctacagaaatgtcaaaatagttaccagttagataatatgtttgcgattaactatagaaaaatgaattacttgaacaaacctctgcaacagcagccctagattcagcatcagtagcagctttccatgaattttgtaactcttttctcatatcctctacctgcttcagacatccgtcaaaggcatttttcttatcaagcgtcaggacgcggacatgatccctttgctcttgaagctcttttttcacttcagcccagtccctctatggatgcatttcaaattagaataagctcaaccaagataagatacagaaggaatacatggagcaatatatccccacaatgagcatgcagaaagagaacaaatctcacagagtcacagtagtattctcaatgttcaaggtatcagtacaggaaattacattttaaagctaagaacagcttgaatgtgagaggagaggcaatgacgaagctacataagcacaaaatactaaagcatatgtgatgccaaataggagtcttacttctagtctcttgatgtactcctcttgatttctcctttcaatagaccttgcattctaaattattcacagattaagagatagacagagaagaatttcaagtattaatgtgactcatctagacatattgtacctcttgaacctcctcggtggcatgtattgtgtcaatggtcgcctgcaatgcatcatatatacaagtcagtgcaagtttataaaagcctcaagacaaagtaattgacatgttttatttgtttcacgaacatttaacttatttgagatcgcaaattaaaaacacaaatagctaaaagatcttgcttgttcatgcttgagtagaccatacagttgtgcgaaactgacagctccaaatttgtcatgagaaatatagggcagagctacgaaaagtactaaattatcctttcaaaaagagcataacaataatatactccctctgtcccaacaagaaccaatttctgactatgaatctggacatatagtctatgcccagattcttacctagaaattaattctttttgggacagaaggagtatatattcataagtatagaatataattgacgataacagttttacaactgttttggaaacataacaaactaacagaaactgcaatacatactactccgtcccaaaaaaagaccaaccctagctacgatcatggacacgctttttttattggatggagggggtacaagacaatattgaaactccaaagtaatgaaaagatatggcagcaagggaaatacctgcaggcgatgcaccctcgtggtcaaatcatgaacttcctccaaagcttttttctctgactttgctaagatctctttttcattctttagaatagacatctagagaaatggaaatcatgtcaggactctgggtcttaatattatttgaggaatgtaaaaatatcaacaaacctccattaatagcttccgtgagttctcctctacagccttcatagattctgagttctcacgcaatcttttttcgtaatcaactactaaatgcatcaattccgcatttcttagcgaaatagaattagcttccttcctctgttttttacatgtacaaagtaaataaggatacagcatgtaataaatgctatcttcttccaaaagactgttatggacattattatgtccatttcagtgtaacaaacataaatattaacaaatcatgatataacacatcaaagaaagaacctggtgttcaagctctgctgtaaatccattaagtcgttctcgagcaaattctgcttcaagaaccgccttatcacgctcagaacgcaaagatagaagctcagtcctaatgaatagtaatcagtattgatcagaaattctatgcaagatcaaatataatataacataatcaacaacagtccaaataccacaataagtagggccatccaaaatcatgtaaaaatgaagaaccaacaagaaatggaacccttaacagcacagatacatggtaagttaaaaaccaaccgtgacacagataacttagatgtgcgtctatatactactccctccatcacaaaatataaggatttctagagttgtacaaggtattaagaaagcaggagaaattaaatggggaaaattgttattagttgagatgagaaagtaggtcgagaaattaagtgggagattgcgagattgctaagcgcccctagcgatcaggattcggatccccccctccctccacgtggtttccttttttggcaccgcattactttcctattttagtaaatttatgcacctaaagtttgtacacctcaagtttacacatctaaagtttatacacctaaagttttaagtcaaaagtttacatacccgtttcaatttgaatttgaattcaaatgttttttatatatagtatttctatacataaatttttccaactttgtttttttattttttaaaaaatttatggtgtactgtagtaggaagagaagaaggggaggaggaagggggagaggaagagcgtataggggggaggggcgggttgatcgctcccagcgatcacccgcccattagatttacccgagagattgttgtgattggttgagatgagtgaataggtgaagttattatattgtggggaaagtttgaatgctaaaaggtgttatattttcagatggagggagtgctacattcacacttccgtcagcatgcttagttataacgacacgacctcaacagagctgggcactaacaacatttcaagatatccgtttcatagtactccagtactccctttgtctacatatgtaggccagcataggatctgtgcatttccaagtgtagctcaccatagaaagttaaccttaacgctttagtcgttcatattgcaaaagtatatggactaactacgtaaaataagtacgttggattgcttgcaaattatttttcatgacataaacttctatagtttgaaaagaccatagaaagttaaccttaatgctttaggccctgtttgtttcagcttaggattattataatctggactattaggagtaagttgaaacaaacagatagcttattatgatagattattacaatctataagccagattactataatctagtaatccactctaaaggtgctttttttagattattgggttgctaacacctaacaaccagctaataatctagagcaacaaacaactaacaacttattctatgtcggcttattataatccagcctatagtaatatgtcttaataatctagattataataattttaagctgaaacaaacagggccttagtcgttcatattactttttttttagcaaagggatgttgttacattgcttcgtaatcagtattcatcttgtccaatgatacatcggaatgaaaattattcaaatgacttcttcccgtagctgttattctatcatgccaataagatttaaaaggggaggaaaacaccacctcaacttagtcagctcttcatcaaggcttttggcacgctctgaaacttgctcataagctttccttgaaacctcctggtcaaaatagattgaaatttgaaaaaagacaccacaacatctatggtattctaaagcctcaataagccttccatcatcaaaaaaattacctgtgatccttcaaatagaaccatcaggtcttttctgccatcatctagagaacaaaataaaaccatcacatgtaggttatttcttatagcagtaacatgcagttgaaaccatcatggttagacatttaaccattttgcctgaactgaaaacatcagaaggacaaaccttccaaatttttgggtatgtgttcaacattggaacgtgacttctgttgttcttcacacagcttcctatacatcgctacctacaaaaaagagaactattttaggactggtatcacatacagcatgcaattgaaattttgcagacagggtttcaaaacgaagatttccaacttcgtggcaaggagaatacaaaaacatacagatctgtgaagggattcaatcattattgcttgttcttcggattttttcatcactttctcaaccctggacgcagcatcatctgtaatcttcttcaactcaatttggaagctctcctggaaagtacagaaacgagatatttttcatcacgtactcatgtcattggatacaaaagtatgccctgacactgatgtatgaacaaactaaaacatttgaaactatagaaaaaacaaagtcaaactttatatataccctgagttccatgtcccttttatcaagatcagcagagagcaaatgaacttgattccggagttgcacattttgctgtactaacccattgatatcattgaatgtcatctgaaacacagtatcgaacagttaaagcaagcaccaacacagtgaaactgaaagagaatacaacggactagcatactcacatgctcatggatattgttttcaacttcaggcactccagtgcttgtgcttgtagaaagagcaccatctcctacatttggaaggctagaaccacaacgaagctgtatatcttggcactcctttaaaaggacagctatctgcaaatatttagagggcagacacagcatatagttagcaaaagcatctgcagtaccacaaaagaaatgttgattcaatgttcttgtcagtagtgacatgcaagaatgaatatccaccttcaaattatatttgaacaggtgaggaccacaagcatcgacatattttcaaagggcatagtctatttttggctcttggactcttttctaggtccattttaacttcaaattgaaaagctagtgttttccaccctttgactttcaaaaccatacaaatactattaataccttcaacactgctccacagtggtttccattgatatcataatagtttttgctagtgcagactcctaatatgcaagcttgtgttggtgcgaatgtcaaatagctggttaaacatcaattaatctcagctaatagaagctaatcatcagtgaaaaccatgtcatctcaactaaaccaccatggaatcaggtatgaggtgttacttgtctggttttataaataaaagttgaaggtgaactaaaaccgatcttttagttcagcgtaaatttagagtccaagaaatatttaggtgccaaaaatggactccaccccttttagaatagcatccttgaaaagatgttggtgagaactagtatcacatcaagttgcaccagatcttaaatatctagagagtaggcaagaggttaacatttctattttccttacatagacaatttaatctgtgaatcaatcaaaaagaacaaaatgcagatgtcatgcttaaagactcacttgtttttgcagatcatctatttctttctgagcaatactatgatcacgttcccgcctttttaactctgactgcaaaaacaagattattgttaaaacttcactatgggagactactatacttaacagaaaattgatgtacgcacctttagattcctaatggtattttcaaaattgtcatgctccagcaatgcttgttgcaacttctgatccattagagcataagcttcaaccatcctcctatgctcagctgaaagggtcaaatgcaaagatatgcttgagcacaaaataattgcatacatgtccaaacttaagcataatcagtgtactatcaggcaatgaagcaatgtatgcatttcacattacctcgttcatccaagataagctcagctttctcttcaatttcatgcaagacctgttgaacaaaagataattcagtaatccaacaggaataggacacttcagaaatgaatcaatgagaaaagcaacagagcatccctgcacaagtacgattacccatttagcacaaaatatgatacaggactacatgtgcgtttacttcatgcactttacaaacacttctcacaccatcaactattaatcataaatttgaaaccttggagaatatcagtgaaaattaatgttcaccctccatctcaaataaatgtaaatctgcgaaaattgatgtactccctccatctcaaaaaaatgtcattttagaatgcgtataatccgattatttgaaattttgactatccatattatggtgagtttgtaatcaaaacttagcaaatctgcatttcaaccttctcagaggagggactacttccatgtggttacatagatagaatatggcacggttgaaagtttgtatttaaagctgttttgacttttgatgtctaaaacatctattaggaaagtggaaatgatgggatcatgggaaagagagtagagattaatacaaattaagagataaactgacgagaacagaactgtaccctctccagaactgcttccgcgtgccttcgtccaaacctctcatggcgcaaagcatcagtagcttcttggtatttctcatagatcttagcgagctgacacagtgaaggtaatcaggtaatatttgaaacgtaaatgcacagattaaacagtatagaggagattggacatacactccaaccatcacgaagaagagaagcagctaatgcagttccagaaacaccagtaggtacttttggtacaatcattagatcattctgatttgctggatcagaaaatgccctgccaaataggaaacaaaaagaatttcaaaatagatgaaaattaaggtcttgtttaataattggatcatactccttcctgtgtttctgttatgatttgtaaaacattgcatatcatggttttccctagcaccagctagatatgatcagtgacttatcaacacaataaggaatgactacaaaatgtttgggaactattggtgttgggacaaagataatatcatgtttacaacggtacagcacaaacagaagttaacatcattcaataagataagctttaatgagcaaaacacaattaatatcaaaaagccttgaacaatgctctctagaaagtgttacttagctatgctaatagcgcctgctttagatatctcgctagactaaaagtataaagtttcagaaataatacatttctttcatcggtgagcctgctagatcacaagggtctgctgcaaccaatggagtgaagctcaattcactagatttccttgtattctccagatcagattcacacttttcaagcttttgctttaagtaggtagcttcctgaatagcatgaaagccaaaagatcaactaagaaactcacaatatcaaactgatttttcaataagaaaaccatccaaaataataatcaatataccatttcaaggtccctcttggctgaagtctccttctcaagcttttccttgtattcatcttcaacctgggtcaaatgtgtctggtttacaccgaaaaaaataataagaataattagattttcatgttcatgagcggggcaaaattaaatacaagtaaaggcattacctccaatgctttaataacaccttcaagttcccccgctttttttgaccattcctcagaactttctttgtgaagttcagcaagtttcatgaccttttaagggaaacagaacaaaaggcaataattaaaagcgtcatcgacttggcttatagagaggaacatcagtgcattccattaaaaaaaaagaaatatcctagatacactagatgggttaagttgtggtgtgccgtgtgcatatacaataacgatggactgatctgctggtctagtacaaatagctcagcacacattttcttccatttcctttctaaaatttaaacaagcagggagtgggagcagtaagggtgaaataaacaagggggggttaatgggaataaaggtaaaccatacagttgaaagctctgcagccaggcgttgttcattagcagctgcagcatcctttgttgagcacaactcctttagatcataaaagcaaagcaaagcaaaaattagatgatggcaataatacaaaagctaacaaatctgacaatttaccttttccatatatgataccctttgctccaattcagaaacccgttctttgcttcgcctcaaggaactggatgattcagaagtctctctttcaagctgaaaccaacataatcaggttttgctttctgcttgcattatgtcacatgtcaaggttggaataggactcacctcggcaacctttgctgacatcctagcctcctcatccatgtttgatttccttagttcagctaagttcttcactttttctttaagttcctcgtcaagccagagattatgcttttcaagcagatctttctcctaaacaggaaagtactaaataagaaccaacggttgctctgtgcaaacatatggaataggtacaattaaagtaaaactccatggataacagattaggtagtagtctacaactcaagaaagactttgcatcaccttatactacaatcttacgcagcaaaataacaccaaattgtttatagcatacctgcgtaattcggttacatgtggcctgcagatgagtaaacttagcttcaacttcttgtatccttgcccctttactagcagaagagtctgccagatttacctgacaggaagaccgattcaacaactacagttaatttatgcaacaaaatgcaaaacaaaatcttcccagttcccaggatgaaagggcatagatatctcaaaaatgcgaaaaactaaaggacttaccaactagagtgaataaggcctagcgcttgcgattgctaataaaatgatattgaatataagcataccaaatcacatgaattccttgattatacagaaggttcaatagtgacacattaataaggtcaaaattatccaacagaaaaactacagagtaaattttaagaaaaagtatgggtccaattggaacaaatgaattttacggaaataaatgaatattcctacatcgaatcggggaaatctccaatactccaaactaggcaatgagatctaacagtatcgcagatatcttacatacaataagtccgacactcaaaagttgatcgcaacatgcaaggaatgatacataacatgtaaggtacgatacacaattgagtatcttaaacagtctagactgatatgaatgttcatgataggcacaaaaaaaaagtagcatgtaaagttatacgatcagaacactacaacaaagcaacaacttatttaaaattgcaaagtcattataattcatatggtacgttttatttattgaaacggcatatcaactaagcaatgcccaaagaactgaaatagaatgccagtaactgatattacgaaaaataatttaaatgtgtatttttcatttgaagtatccgataaggatgacctctgatgcataaataaaataaaaattcaacttgctactacatgtaaaataaaaaagtatggagacagacgtaaaactacaggtaaatcgagttaaaatcatgtctgacgttcgggtaacaactcatacaaaatgcagttgtgtctcatacacatgcaactcaacttctgccaagtaacatgcaaaatgaggaaaacaaattttgtggcctattgaagccacaaaatttctgttgtaaaacctatcaagcaactgacctaccctctgactagggttaaaaggaaagctacttcaagtcttagaacatcataaaacccccgtcctctgtttgtcgacagtagcaacctaggcattgcactggataacaacttatccatatgatcctatattcgcacatcaccttagatatggagttccaattttgctggatgctgtgcatcactagaagtgggagtacaaaatggtcaggatggcttactattttatcgaggtagttctggatgatgccatccttctcccttatctctgcatccctctgctcaattagttccagtgactgcgacttggacttgtgcacctccgagatttctactttcagccgttcaatctcgccatccttcgcaatctgcaaaccccatcagcagcacagagtgatcagtgtgacctcagctaagccgaaaaactgagctgaacccaaataaaaactagggttcgtacggcttggatgcggagctggtgtatctcggactgggaagaggcgagatcggcggcgcggcgctcggaggcagccgcgagctcggctagctcggcccggaagcgatcggcctcggcggagagagtgtcgtagcgctgctcgaggagggcgcacgtctgctccgccgcgatggccgccgcgtcggcctcggcacggacggtgtccacctgctgccggagctcgcggatggcggcgtcggcccgctcggcgacggcggccacgtcaccgcccaagagccgcagctcctcctccgacatgaagagcggcatcgccgccgcgtgcggggtcgggtaggcggcgcccctagcccgcccggggccctcgcggatggctctaccgctctagcctctagaaggttctagggtttgtcgcgcgccccgcggggaggggaggagccaagggtggtggtggcggaaggcgaatggaattggagtgaggaggcggaggaaacgcaaacgcgaaggggaaggggcgagaggagggcgaggcagaaatataggtcggaaggaaggacgcgtgaaggcggtcggataggctcggcccaaggcccatggactatctggtgggcctgtgagacctgctgactgctgagtgacttgtttgggccggattgctgggcttctgtttctcgggctgtggcgtgtaggcctatgagtttgtgggctgtcttcgtctaaaaagccgtttccgagtttcacatgtttaaaccggacccgattcaggtgcagtagctagtgtgatgcaagataagcagtcacactagcatcgcatgattaaaaatggacgtccgagatacatctgagactgtagaaaacactgtagcattttactgtggaagggtactgttctaattgtactgtgccaaatcctttttggccgttagatttagacatagagggctcagattgtgtgcagtcctaatagctactgtatttgatctcaattcgttaaaaccctataaaacaggagaataaataagcatcaccaacagtccttctattttatccctatttcatctcaaaatcaattttgagggattttagtgaaagaaagcactcaaacgagtcccttactcagttgcatgatttttggagttctctttcccgaaatatttgctctgttgatatacgggagaaagcggcttccttgcccacttccaatctagctgctcccaccttcctcctctcctggcgcggcttcaggggagcgccaggagatagtgtgcgctgacgaagtaaaatggaaattcttttggtagtttaataaggtctcacttttatattttttttaataaaatttaggtttttctttaagatattacttattttgtttcctattttgagtttatgaaaaaaaaacaaatttttagaggttatatgtaatctcttggtgatgctctaatgatgtcatctccagtgcactgcacgggagttcaagtaaagaaaaaaaaatatgcgtattccattcgtcggtaaatatacaaaactcgattacttgtgcacgaatattcccgttggagcgtcaatgcaaatctaggaactgagggcctgtttgtcacagctccagctccaactccacctctcccggagctggagctcaaccaaaccgtttcagctccacctgaaatgggagcggagctagtgttctctcataaaatgaactagaaaggtaaagctgggtttagacagctccacaacttcactccagacccaactcttgaagctaaatttataagttagagttctaccaaacaagccctgagatgtgaccacccagcgcttggtatgtctttcaataaaggctgccatcgccaaatcatggttttcttagacaaaaccatcagaagctcacttggtagttggtacggaacggtcaaaatgctggaagaagttaaagcctccaaaagaaaaggaaagaccccgttcccgataaatactgatcgtcacagtaagggcttactcgttttaaaggattttttcactcataggattaggaaaaatgaaggaatagggatagctgtggagtccaatcctatgggaagctaaacgtcaggaatttaaaaaaagtgtgcattcggatataccgcaggagaagtgtaggaaatctgccgtttgaaatatatttttttaagtttgcatcaactgacatcggccctcaactagccgttagctttgaagtgcataaatagccctcgttagccttgtgcaccattttcccctgttctttctatttgctcatcaactgtggaagaagcttgctgatcctttgctcttctcttcactatctgcataatttttccagaagctttactcatcgtctagccaccatagctggacgttacttgctcgtgtaacaacaaggtactacttgttcatctggtgcaccaaaattgttttttcctcagcaaaagtcttgatttttagctctcttctatttgagtttacagcatcagtttggtaacatctgcacaccatgaatccaagctaccgacgtatatcagaaagtgatgatgagttcattcattttgttctgcctactttaggagattcatcacaatcatcttgtattaggagaccaatgcacacgtcaaaacttacagggggttgccgtgtacatgagattttaacaggacatgaaagattatgcaaaagaaacttccgtatggaggtcgacatttttcatgcactagtcaataagttacgtgagaaagagtacctaactggcactatatgtttcagtagaagagcatattgctatattcttatatacagtggcaaaaaatgcaaccaatgaaacacttcaagattggtttcagcatagtccagatacaatacatagatatttcaaagcagtgctggaagcaatcacaaatctcacatctgtctacattcgtgcaccatccctacacccacatccaatcttgaggaaaccacaattttaccccttttttcaggcatggccacttgttaagttgttctgatttcatattttgaatatcctaatttttcatgaactggacaaaaataactttgacatgtcttgtttctgtgtagaattgtattggtgctatagatggtactcatatccctatgaaacttccattggatgagcaagagccatatagaaataggaagcaaacaatctctcagaattgtatggttgcttgtgattttgatttgaagtttgtgcatatacatcctggatgggagggatcagcttcagatgcaagagttttacataatgcacttaatcatggttttcaagttcctggtggtaaattttatctcgtagatgctggttatgcaaatactacttgttgctgctcatcgccgccgcccgccggcaacaacttctctgaaccaaacaagattgccattgggcaggcgctatgaacccttgtgtgttacagctgcgaccccattcgcggcgacccaaatgctaaggtatatgcaaggaagcagcagggggcatcagatctacgcataacaacgcaagaggaggcaccaaacctgcaatcaacgcgtccttgccgatctctgccgtggctcttctcgttgttgccgttgcgtcctgtcacctgggcggcgaaggtgcatccggtgccggcgatcgatgtgggagaggaggtccagtacccaatcatggagccaggagaggaagtggtagaggagatgggatcaaaggcgatggcttctatgcgagtctgtttgcctcctgtgatttttttttattttcctttcagcgccggtacctaccttttttgtcgtgagagcgaaaagattacgcgcgcggtgcgctcgtggcgcgctcttttcgcgccaggaaaatttccaagaggtcgtactagatgcaaaaaatcctatgttttaccgatacagctggcacaaaaggaaattttccttcaaatttcctatagctcaatcctgtaaaccgaatgctgtatacaggattcaaatcctctgttttggaaatcctttggttttccttagaaacgaataagccctaaaagcttttgcattgcaggatgcaggattcagtacaggtgaatgcccctgtttgatttcatgggctaatgtttacccctcaccttttagcctcaaattagctctcaagaatacaaacaggtgggctaattttgagctaatgtgaattagccccccttaaaacattagccccttcaaggggtgctaatggggctaattttgtgtggtgaccatcaaaaggcagctctatctccttctctctcctctctttctactatttctccaccttttagccttgaattagcctatggatccaaacgtaccaccctaggctaatgtttagcctaccaattcatgactaagtactagctctcaaaattagctctgggctaatcttctaaacagggcccaggtacactgcagatgtgccgtgatgccatccaaattccatggataaggatcatccaaattcctctgattctcgagctacggttgatgtttgttccgtggctttaactgaaaatcaaaagtgccgctcatctgatgtcagggactgcacgtgccgggcaagcttttgccatgtccaccagcacaagggccctgaagcctggcctgggacgtccataccaagatgataagatgaaggaaacatgccaaatagtaccagtcgttcatgtttcgtcatccatcatttttgttccgcggccgaattgaatcctggaggatgaagtgccgaggagatacattttggtgcttttgtacagtgttactgcaggagcaacactgcaaattaaagtagaggcactgagccggcgaggggccgcagcgtgcaatggctgggatgtcctgtggtggctggtaactggtaagcaccagccatcaggcactcactcgctctagaagttggggctaattagctgcattaacaagtggttagtagctgacagtatttaatttctgcgagctgttgctagcagagagccagaagactacctatatcctacgctaacaagtggcttgccgttaatatacagtgggacagtgagactgtcagctcatgtgttcttctgaggcatgcatgtgaaaacaaacaactggtctactgcgtcaatgcataactcagcctggtagagtggtaggtaatgttggccttggcttgtgggcatcttgatttgagacatttaccacttgtcctgttaggacatcaggaacagcttaaacaaatgtttgatatcccaataggcaatcgccgacgcgaatcagcatgatgagtttccaacctccgaatgctctgatgatgctgattccaccatctgcaggtgcatctcggcatctgtcactgggcactgagcttatgattgcgaaatttggcatcaagaattatacttgtataaacagattaacatccttaaaaaactatgatcatgaaatgcgctcgattcccatttgtaggagagcatcaagtacagagtttttctggctttttttttctctttttttctggagcaacattgttctgattccaggtgcaaatgtatcaagaaagaaaaaacgagcaacctcacaacaaggccccatcaaagcctgaaaatttacacggattcatcagggccagagtttcccgagcagccctgtcatcctgaggtgtcaaactcaacttcacagtgtgcaaacgcgccaacctttgcaaagctaatcaaggccgggtgaaacaccgaaaaatacagattcaccgctcgacgattaaccatcgtatgatcgtgttctatgcttgacgccattggcagggcatcagctccccgtcgtttcgtcgatgctgtgcagcgaaggccgccattgccggtgccgcgcgctggagctccggttgctgtcctgacgcgccaactgcaatcaggtgggtaaacagtagagtaatcagaaaagatggaacctttgcatgttgccgcggtctcagaagtggtaaggaatctcgcaatatggtcctggaaacctgacactagttgctactccactcactaaatttagagaaaccaactattaaaaccagttggccccatagggccacaaccttataatcttattgaatgcatgtcacttggaggttgggaataggtagtactgtattctcaactgggctcattaagacgaggactcttgatttccgtgattactagggagattcagcggttgcaaaaatcttaaatggaaatcccaaaaccaaaaaaaaagaacacttcttttggatgataaagtcagatagacagaagttaaaaggagatagagaatcatggaaggacacggtgatcgcgaggaacaactaacgacagcatctgagagagacaatttaggctgagttcggatgggggagatgggaacccaacttctgcgcacggaaaacggagcagtccattaacacgtgattaattaagtattagctattttttttaaaaagggattaatttgatttttttaagcaacttttgtatagaaactttttataaaaaatacaccgtttagcagtttgaaaaacgtgcacgcggaaaacgaggggaaggggatgggaaaaggtgaatgcgaacacagccttaaagaagtagtaggagcatgtatcaatcatgccacggacgtgcatgggagcatcgaacaaaaagtggttggattaaagcaggacaggttactaccactctgatccatgtaaacccacctgatcaagactcgcatccaacgccgcctcgtcgtcgaagttgtcgctgtcgttgtcgttctcctccgcggcctcatccacctccgccgccgccgaagcggcggcgcgtgccttgctctgcagcttctgcctcgactcctccagctgctgctgcgccttcctcaccttctcctccttcctcgcctgcaccgccttggtcacctctgcaacaaaaatcacaacaaacgcattcggtttagtcgcacgaagaattaaccgaagcgaaggaagaaggagattaaagggcgagtgagtgatgtatacgcataccgtgggtggtgatgaggcggtaggcgtggccgaggaggagggtctccttgggcttgaggagcttgacgcgggtgaggcgcacggtgcggcgcgcgccgccgtcgccgtcctggcgctcctcggcgacgcggagcgtgacgagcgcgatgtagtgccccgggttggcgcgcatcacctccgcggcgctggtcgaccagcacagccgctccacgcgcccgcccgggtgctggatcaccaccgccgccgcctccgccgcctggcaattccccatcctctcccccccgcaacgctcgatcacacacggttagctagccgagcccccaccgctatacgggaacgggagggaggcgcgcgcgaggtggacacggcacagtgagcagcgctgcagcagcaactgcccgagcgacgaggtggtgtagtggtatatatggagagtggacttgaccaacacgtatcctgtatgtatccacctcctcccccgctgctgtcttcggcgcacctaccgctcaaacgcgccgcctgctcctatatgtggtcgtgacctgcgagtcgcggcagaaaaaaaaaagagatttaaagaggggaggtccctccaaacaatttaaagaaattatgtgttagaaattaaacacgggatctcgaagttgaaatcacacaactcttacttctgcaccatcaagtgcatcacagagtagcggcaacccaccacctacctggggtcaaaatggttaaaaaacagacgaaaataattctaatgtttttatttttattttcatacttttcttaactggaatagaaatagaaaacctcatattattgaatatgataacaactcaacaacgaacattttccctttttttttcaaaaacaagtttgataaccgaaaaatttccaatacgtttttatccctactccctccgttttaaaaaaggcaaaccctaagtttccgtgttcaattttgactgtccgtcttatatgaattttttttattattcgtattttcattgttgttagatgataaaacatgattactattttatgtgtgacttatctttttatttttttataattttttaaaataagaaggacggtcaaacgttagacacagaaaacaggttttttttttttttttttgaaggagggagtacgtaacaggcagcgcatgggcagagctacgaggctacgagcagctaacgcgagcgagcgagcgtgtcgcggtgcggattacgagcaggaggccaacccgcccgggcacggcgcgcgggggggggggggggggggggggatcggtcgttttcccgtgcgaggcgcgagggggccaccgtttttccgtggagcgacgcgcacgtgaacgcgggggttggcacgtacatgttccggggcggttgtttgtactcgtccggaacgggaagctctgcctttctgacgttgtggccgcgtaaacgaacagtgtggtgcacagtgcggagatgggaacacacccgtgcgtgtcgcatcggccatcggcgccggtcgctttcgcgggttcgtcgtgcggtttggaccatgaaaagccaagccaaaccgaccgagccatcagcctactactactactactatgccctttcgggctagcttcacccgtgcggcttgcttccgtttccttttctttttctaccgttttttgcattgagaattttgagtgggggtcgctgtcctatgtacgtacgtttggatcgattcactggtgtagctaactcaacccatgctggtaacggggctaaggatttggcgaacaattgtgaagttttgtattggtgaagttgcgaagagctgccaaacttgtgccaaaacgttgtattctagcagtgccactagtagagaactttgggcgtattcatctgtaagagaatcttccgttttttttgtttttgtatacatctaatgcatgccaaagatagagccggccacacaatcttttctttcacgtaactggatttttagtcctctgaaagatgctactagaattagctcaggagcaacacgaacacatgcatggattaagtgaagtcagctctggtccggtagccaaatattctggtccacatgtcaattggcgaccactacctaactagctatggaagaattaattaaaaagggaaaggctttgccatttacatcgggcaccaaaatgttacaaacttacaatatgtactagtataatatgcgatgcaaaatgcagtctagttccatgacgtcttcgaggctccttcgttaattttgtttacaaacgtcacagagaagttccatgatggatggcacatatcatggcccaaaatactgcttctatcacagttctgtgatcatggcttggtcttcagtatttttttttttggttctgcactctgcggtttgctgataatggaatagactaccttatgatttgcgacgacaatgtcttctggttaccgtccaaccagcaacatcctgaaaacaagctagtccaatttagtattttaattgtatcctaaatgcttctcatggaagagggagagaataagcgaacaggcctgttttaaaaacagagtttagctgaggtgtttacagtctatcaaaatatgaagttccgaatgagattataggtgtcatgggccaggggaaccgataagcatcgatctcacgatgtttagtcaattagggccactccatttttgcgctgatcttcatcctgattacatggtgagggtcaacactcaacaacggcaacgcagttatcaaggcaagttaaacgtcagtatcttgcggcgtgatgtcaagatcgagtgtcacgtaatcccacagggctgtttcgacgacccaagtgctgatgaatttaatgaggccatgtgctctgctttgtgcgagaggctgccttctcgcacaccctcaggcccatgccgtcttcctccgtactcctcctgtcaagaaaaaaaaattctagaacagaatgtaacatattcttatactatgaatttaagatatactcgattatatttttaaataataaaagcttttattaaacttagtcaattacatcaaagtgatacagttatcctgagaacacctctaacctctacataactaagatacatacagctgaacatacaaaaccacacttaaaaagaaaaaaaataatactaacatggagtgtcgaggaccatcaataaaagactaaattgccacccattaattacatactccctccgttcttaaaaaaacaaaccctgaatttccgtgtccaatgtttgattgtctgtcttatatgaaatctttttataattagtatttttattgttgttagatgataaaacatgattaatattttatgcgtgacttatctttttaatttttttatattttttttaaataagacgtacgatcaaacgttggacacgaaaaaccagggtttgtttttttggaacggagggagtacactccaagcatatatgtttagcttcgtagtactagaatgtgtcacatctactactgtttgtttttttaagggacggaagctactgctgctgctgccgttttgcatgcgtcacacatcgaccagttgactgacaggtgggccaaaaaccgagttggccaccgtcgtcagtgacatatccgagagctgactgcaccagtcaggattcaggaaacataggatggggtattggggtttgctatgcccatgtgtacgacatggtgatggcatgttacgcagggacatcttcctttgcaagttgcgatcttgcaacagaggcagcatagtgtatgtttgtttcctgtgatgctgagatgcgcacaggcgaggaccgcatcgctgtcagtgtgctcacgcacaactgcacatcgaccgggcagcccgtaaatcgtgtgcaattgcgtggctagtttgacaatgtttctgacttttttgtgtcattagctctttgtgcacggatggaacagttgaacaggatagcgaaacggtgaaacgatgaagcacatatgtttgttgccttcggtgcgttgcctgccatggagcgcaagtgggagatttggcgatcgtgttgttggctctgcgatgcaattgataatgcgattgcggcaaatgcatgggccaacgaaggccaggcccactcgaatcatttcggcaataatgcgtgcacatttacagcacatgcacctgagccatacatttattcagacaaggcttgtatatactcctatctgttataaattttccatttctttgactgaactaatcttggactagaggcccaaaaccatgccagaaaaataaattgcagtagctcgaccagggaccatacgttcgcaactgggcaaacttgtagtgtaaaaattaaacttactagtattgaatatcacatatcataacatcacgaatacagatagattatattttgtttgtttattttgagatggagagaataccattattaatctgtatcctcctcactagcaatagtaattcagtactggcaccaagtgtcatttatctgttcatcagtgctaataaaccctgtgactgtgaggctgtgaccctcatcatcatcgccttttctgcttgatggtggtgcgtttgtgtcagtggtggtgccgactgccgagcccgtgtccgtgcagtgccgatcggcgttggcaccatctggggcggcggttttgtcaggtttcagggccgtgagaacgcctcctagctgtcgaacggtggacggaagcaaagcaatgatcgccgtgggtgttggtggtccaacgactgtcgtgagccgtgaccacaccccaaatggccgatcgattagcatcgctgcatcatcctctctcggttagcccccatctgcttgttgtttcctgtagatttgccggtttcctccttggttgcgtgcgtcagaaagacgggaacgcaaaattctgggagtaacatgacgaaatttcttccttcgctgaaggcgatcgttttaggctattgctatcagatggaggcggctcagctgaagatctttgcatatttgtgaagtactagtagtccatgtgtgatatggtcgtatggcacaaagatttggcgcgataaactgacaagggcagtccacatgatttcacatgggaagtaccatttctttatcaaactccaattcctatcttgtttcgtttccgcgaaaatctctctcgttctgatcagtgggcaagatacacagcaaacggaggtagatacttcccatccatcaaacgataaaaagacattccgatgcatcacgcatttgactatcggagggtatcaaaagaacaacaggccatgacaaatctgcaacagttctcttcgtgttcatggcataacatggcaaaatagccggggccaaccttaacaaccagatcaaagaatgttgagaacataatctaatctctagaaatcatagatgcaataatatacaagcacatgcgggatataccgctatagggtcacggatggatcattggagagcaagccatgaatcggtacaaacaagagaatgttgtcaatgaacaggtcttatccacacgtcggacatcaggacacgcataggagtagttctgagcggacgaaaccacaatctgaacattttacctttaggtagacctagaaaacgaaccacgagtaataactcaggagtatataatctagcatctacagagtgctagcagaatcgagaagaaataattaagaaaattttcatcaagcagtacacggggagtaagcatctgaaatgtaattttcatcaagcagtacacggggagtaagcatctgaaatgtactgcagttgctgcactagtaaaattaccagctacggctacgttctgtcaacaactccacaggaataggtcatatcggaatccattgctaacagagcacaagaagtaccaaccacaataaagataccattccattgtatactaaagcctacatacagattttagcttcactggtatgatcatacaatgatacttcctccatttttctttatttgacatccaacgtcaaacaaaaaaaaatagaggtagtattaaaatggcgttgtcaatccattcaactcctttctaggtgagatagcccacatgatgtaagaatcaagagccattttcatgtgcaaatgagtagccaaaatttcctactattgcccccagataggttaaaatatacatccgtgccataattccaccaatatttttttgttcataccacaggattcccttttgtttaaaggtctacgatttccacatacctagagaattcaggccaacagtttgccacttccagggaacctgttcataagggacagacagtacacagtaacctactcttgcattagccacggtatgctcatactgatgggaagaacttgttcaggttgaacggcagggaatagaactcctcgcttcttgtgtcagtcctgtatgatcggaatttatcccaccaatggtgtcctcgatcttttctgacagaactatcatgcctgtgaatcgtgttgtccagcaaatatgcaacaaagccagcaacgaatgcctttgacgagaatatgacattcacgatgtcattgaactgtacaagttaatgaatcaagtgattaataactcaaaagcaagactattacttttacagaaaatatactaaagatcatgatgttacttacccatcttgagtgtgtatgaacaggaccataaccagcaacagatgtgtactcgttgaagtactgaggaacagaaaggcccataaaaactgagaacccgaggatgaacttggtcctgaaactattgagattgcagaactgaaggaaaccaaccccagcagaacctgttgacaacgtacaacacatctttaataaaaacataaaactatcttgtagtgcagactacaagtgaaaagagaagtgcaaacataagtagcctgaatcattcccttccacctaccgacatatgcaaagaagatacaatagagagctgcaaagatcggcggaggtattgatgcaaagacagctccaaattttcctgattaaaagaaaagcattattagtacaacataaatgtgcttaataaaatgatcatagccaaattatttgctatgcataatgctatgcgctttgaataagacagtggtaaaaaaatcgtgtggatgcaaaagagatttaagctacttttagctggattgcatgaattagaagcttacttttcatcctatatttgtttcttttgaatctaacataatctgaccatatcacagttatgcaaccgaatcagctctaatatcccaaaatcatatagttacagaaacacttttgtcttctaaaatgagaatccaggcatcgtcgacaggtatgtgctaaagtcattcttaaattagaatttagaaatgcataataattgatggctgaacattcaatacaacagaagctatagcaaagggtaaaagagagagttagcacagtaatggttgtactaaatgttaaacagtgaaataaaatgagcattataacttagggataatatgctggattatcttagttcagtttattcagtagactggtttggtgttatgatgtgtccatccttggaaaacatgtttgtaataagtttgccttggaatttcaaaaaatagtcaatatctttaagcatcaacctttgatcatattcaagcacagttctcagatgttttcttgagttaagacaccacatatactaacagcccaggaaaactgaagggaagatccccctatccaaatactactgttagtataactaatccatgcaacacttacataagattaataatttggaagctttagtggatacgctgttaatttattttagtacatacctagaacatccatctccgatgacctactagatttccaaaaaaaaattataagattcgcaggtaacatacttacccagaatagagaagaatatcatgaaaccagctgatatctgcaccactcttcggctaccaacacgtgtcaaagctagcaatccagcattttcactacaggtaaggaaaagaatggttgtatcaaatgaaattagatgtattctaatgagaatggaagctgtaccaagatgaacataaagatccattcccccacgaggtacccattctaatgcttacactgatacagaagaaccatttccagtcccaaatagcccatccaacaaaatgccaatgccctacagcaagatgaattatatatgcttcaagttgactccagatttgcaaattatcaagacaaacttggaacatggtggataagcatttacctgccaaccaattccacggctaagtacagagggtgggagaggtgtggcactagcataccttgaaacagcaatgaaagcaccagtagactacaaaaataatagttcaggagttcataactcattacttcagaatcctcagattgaaatgaagtgctgaagtattatttgattttcccaagagcatggggccatacctccaccagagcaacaaatgaagcagccatcattgcaaaagcttcaccagcatcaaaagttggagcaccccattgaaagggatagggaactcttatcctgtcattgtagttgtacagaagataggaagcggtcatgttacttttacaacgagagtggcaccaatggaacagtcatatttttcaaaaatattaccaaggagcaccaccaattattccagaacggtcagttcggcaatgaaactgggtctttggtggtgcattcctgtacgcgcctccaactgtgagcagatatgcatagagccacactataggaatagtgaacagaacagcaaaacggtcgaagatagacttcatcatgtgtatagcatgaggcaggtactgcaaaaatgaaacaataaaaaggaaaaaggaaagttggagcacagcgatgctaggtgaagaaggtgacaactacatgatggaaataaatgcgtaccattgcgaagatcaccaggaggataagttctggaagaccaatctcaacacacttggcaacctgagcagttagtctaagatgagcaatacaatattttaaacaaatatggagtcttgagtggaaacacaatactttaccgagggaaaaccaagctcataaagtccaaagccgactagcatcaccagtggagcagctgacaatggactcagatacctgaaagaaatccagtacatagtaatgagactgaaaacaagatatttttttctgcaagatcatttcttgcttgagtacctctgaagcagctacttgattaagagaaaaaacaatgccaattaccaatggttcacctcagtaccttgcaacattacgccaaaggccactgaaaccaaatatgatttgtagagcagaagccacgatcaatgcaccttgtgttccacgcatgattcggaggaatttcttcacataaaaataggtgatccatcaggtcaagaaacacaaaaacaatatctgaaagtaagtagctactgatttttaacatactgtgtgtggatttggttcgttggcataacgaccagcaaggatgattgagatggttggtacaacaaatgtgtatgatccaccaatcaccgcaggtaatctggttccaaagaaactctgcaaaagggtgttaatcccagccacaaacagcaatgtttggataacaacagccttgtcctcctaacacagtaagaaatactgttagtcttgattgatggctcaagtcaaaagaaacacaaacaggtaaatgtgtaatctcacattgtttcctcccatctgcggaacgagtgcagttggtatgataactgtagttcccagcataaccagataatgttggaaaccaagaagaatggcctcagctgcattttaaaaaattgcatacaacaaaatacttcagaaccaagtttctaactaaaaccatacaaatgttataaacagcataaggtggaaatgtataacaaacaacttttatagtgggatagcagatagaggaagaagccatacttggcaacatataaaaatgctgtagttaaccgtaacgtatgtagtttcgaaaaagaaaaagtaacgtaatataagaagacaataagccaattttgaagaaagatcaaaaaatatcaaaactaacgattacatcatacagtgcagatgagtttcatcctttagaactcttgcgagtgttgttcgttcaagttcatgcatcatgccttgggaatacaaattcaaaaaaaaacgtgacagggacttatctaataaatacgtgaaatcatgcacaaagagataaaatctctgttaaaaaaacatgagaacgaatggaactcaaagcgacaacgatttttcgatatggacagtatcgtctggaactagtaactatcaagaaagtacatgcgaattccactacatataacacgccaactatggatagcaacaatatgtatactagtacttaacaaaaaaagagcacggtgcatgtgaaaacactggagcaagtcaaagcaaaatttaatagaactgaaattacccaacaaaattccatagtattactggattcttgaatattccatccacacaagtctccatcacgctgacattgatataaatcgaggcaacagcgaaacatgatcgagagaatcggaatcagtctgaagaatgagcatcaaactggcaccaaaaccccggttcctacaacgctttccaacaattctaggtcccatctggtgggttgatccgttcatggttggtacccgcgactagaatcaaacgagtcaaaccttttcagcatcactaaataaactaatgcgaggtgttattaaatagccgggagaacaaaacgaaaaggcaaatcgcttttaagaaagcgtatcaagttcctaatgaggaaagctcgagcagatctatccactccctcgcaaaaacaacaacagcaacaactcaagcgcagcaacgaagcacccccgcgtagtagtaaacgcaagcacgcaaaccaccaccaccgacgcgaggaagcaggagcctcgcgaaaacgacgcgaggaagcggagaaccatcgctatcgcgatcgaccaaccggaaacagagagcgaacgataaaccccgacaagagcgggggggggaagcgtgcggagaaaaaattgggtagggagggggtttggttctcacgccacggaggagggctggtgatgcagtaggagacgccggggagctggtccttgacggggtgcggcgtcagctcgtcgtgcttcggcgccggcgccgcccctccccctcccccacctcctccggccatctcgccccccgcgcggccaccaccacagcacagcacaggcgcaatgcgagtcgagtcgagacgagacgagacgagagcggcggtggtagtagaggagagtggagtggagtggagaagtggtggcagagcagtacagcggcagtagtagcgcgtctagtactacccggtggatcagagtagtaggggggaggagagacgcgagccgggtgccgtgtgaggagggagacggcagaagcggtcaaaaaagcgcttgccgcagcgggtggcaggaggggcgcagcagggagcggttgttttgttctcttctcacccccaccaccgcaccacaccacgcatcgtttttcttctctcttttttttcccccttctctcttcgccttgtgggaggacagttcacgcacaccccgcagcgctccaaaaccgcatttatgcccgtgttgttttgcgtgtgtgcgtgttcgagccgtgcgaatctccccagtctcatctctctctctctctctcagcgcgtcaaattttgcgggtaaagggaaggttgggataattcacatttgattcaggggggttgtggtgtggatttgattcgcctgagctttttggtacggtgccgttttgcgcagcatggtttgctgtgcatttgtgggttttgagtttgggcagtagggaaaggacgagttggtcatggattgtgcgtgaagaaaaagatttcttattgcagatcactcctacgagtacgatggcgtagcacagtggttctcacagtgaagagatgagtgggactctcgtctctctttagcagtactctctccgtacctaaagaagtgagtaaaaaaaagccaaaccctagttttctgtatccaactttaaaatttttttataatttgtattttcattgttgttagatgataaaacatgattaatattttatgcgtgacttgtctttttaatttttttataattttttcaaataaaacggatggtcaacgttggacacggaaaccagggtttgttttttttttttaacggaggtagtaccttcttttccgttgggacaggaggggagactaagaggcatgtttcggaagttttagctggtacagcttatctcaggatcgaaagcattcttaaacagtttaatttttttacattctgaaaagctataattataaaatcagaaaacaaatcacaagccaaaaactaagaaacgaagctttttcagattctcggagcggctactaatcagttgcttaagcttcttcaatcaggctataggagagaaatgtggctactccatgtgagtagtactagcattagtattattgtgagtgaattattgtggcatagtagtatggggcattggggtagggcagaggagcgagaatggaaaatggatgagtatactctttttttttttcgcgctttcccgtgtctcgttccaagggaagagaggtgaaaagaggaggcaagtatgctttcgacctgtacgcaaagttgcgtcgccgtactattccctatcattgtgttacttggttgttttctctcaccgctacagtgctttgctttttttcgccgggacttggttatttcgccatttttcggtgagaatgattagtcacgggttcacagaacatacagatcgtacgtgaaattcgcaatggtgaatcacaggaatgaaaaaacggaggaatagaaaaaacataggattctgatagtaatgtaagtgtaaaacagagtattgcaaaacacaggaaaaacgtaggaatgatcgtttgattggaccacagaaaaaacataggaatttaatgagagataaagactcaaaggatctacctctcgttaaaattcctccaaaacttatataggaagagacattccataggaatttcataggattacatagggtttattcctttgattcaaaaggctttgtaggaaaaattcctatagaaatgaaatcctttaaaattcttatgaattttatttgaatcaaagagggcatcattcttgtactcttggcttcttgggctcttggccgccggagtagtcgtcgcctaccataagcattaagcaaaagtgtagttttggtagggggcacctgaccgtgcgtgatcaagggatccaactaactccaataaatttattatcagatcagatggcattctagaactagaagcactcatgtttaagtaccacacggccgcattaaattagaaagattggattgcatggagatctcgaccatgcgagaattcgtgtgaagcctggggatttgtttgtttgagacgaccaatgaggcagctggctggcaaattggcatgtggagctctcgccctcgaacgagtacaagagaagcgagcgagagcagatgctgcagcaaacatgaaagtgaatgggacttggagaaataaatgcacatattaatggctctcacgctatactttccacatttatgattatgagttgactaattttaccctgcatggaaaaccaccgtgcgggtaggagtaaaaacacatcgagccaatttaatgcactactccgtactagtactgcgccggtacgtgcagacaaaacgtccagtgtaacatttgttccaaagaaaacaccagtactagtggatgcagtacctatgccgtgtggtgctgggctaatgataggacgagctgggctttccagctggccaggcccgatctgctagtcaacagcaacatgtgataaagcctgatattcccttatcgatctactgaggccctgtttagatgggacttaaaacttttaagtccctatcacatcggatgtttgaagattaattataaatattaaacgtagactattaataaaacccatccataatcttggactaatttgcgagacgaatataatgagcctaattaatccatgattagcctatgtgatgctacagtaaacattctctaattatagattaattaggcttaaaaaatttgtctcgtgaattagcttttatttatgtaattagttttctaagtagtctatatttaatactctaaattagtgtctaaagacagggactaaagttaagtccctggatctaaacaccacctgaggccccgtttagatcgcgaaaagaaaaaaaaattatcacatcaaatgaccggatatcaaaataaatttctggacacaaatgaaaaaattaatttcataactcgtctgaaaaccgcaagactaatcttttaagcctaattaaaccgtcattaacacatgtggattactgtaacacttatgattaatcatgaactaattatactaaaaagattcgtcttgtaatttctatgcaaactgtgcaattaattttcgtttttatctatatttaatgctttgtgtctagagattcgatgtgatgtttttggagaaaaaaatttaggaactaaaccaggcctcatactctgttcagaaaaggctagcaatactcatgtgctgtataaatcaattaatgtcagaaaaaaaactcgttcttacaacaatgtttgagcaaaacaaatcaggtataataacaacgtttccacagtatgacagcgaagatccattcccatgcaagtgtgactccagaatatccagcataagaatgagagcctatttttgccatggtaaacacattcttcagtcacaccaaggaattatgtgagaacatgtatagaatatatacgccagtggactggtatcaacaattctctatgcattatatcacaaatcagactgaacgcgacaacagatgagcaacttcttaacctgaacaaaaaaattaaagatacagcatagtacaggattggacaatttaagtttcagttcctgtggtctagaaaatgcctccattctccctatattaattctgcagtcagaaataaaaaggttaccccgattacccatgaagtataagtttccccaagaagtataagaaaaaaaaactggagttacaaatctcacacaaaatacataagttcaatgaagcattttccattgtagctccccatctttcctttgttatctataactcaccttctttcaatgccatcaatcaaattttactttctaagtttgcctcaatcaaagccctcttacaaccagcagctgaattaacatcagcatgacaatttattcgaagggcacatctataacaggatacagatttagctagctgatgagatatctataacaggatacagatttagctagctgatgagatagtttatggcatggattttgcagaaacaaattttagaaaaatctattgatgattcagcccttaaagtagagtacaaagggggagttcaggtgaaaagcagccgaataagttagaattggccaggtacacgcacatgtagccttttcctttcaaagtcaagctgcaagacacaccccaaaaagaaaagatgagatacataatgattagccattttactactccctccgtcccaaaatataacaacttttagaccttaggatttgtcccaaaatataacaacttcaccaacatgctcttcccaaccaatcacaaccctccactattcacttttcccacctacctccactactcatccaatcacaaccctccaccactcacttctacctactttcttaataaccgtgtctaactctaaaacttcttattatattctgggacagaggcagtagtttatattattagtacaaatatggttcacaagcatcgatgcattaccactttcttaacccgttcatttgcagcagatgttcctccactgacattttcaggcaggtatggattgcatacacgaacctccttcattacaacaatgtcagtcttgtcccactgaactggaagcctgagaagaatataacttgttatatgcatacaaatttacgtttaaaacaaacagtgtttcattacattttcacatatataccaaaaagttgtgctaataatgcaacatgcgaggacaacaggtggaaaactggcaaaacatataacatagttccatgatgtagagaagctttacaagatttgtcaaaagcaatttgttgcgaacaaattagagtaagccacattgacagaaaacaatttgacactaacagaataaaatcaaacaaaaagaaagaaaatttattgctgtgaaaaacatgaagccagcgtctgcttgccttaagtacagaaaatatcactgtgttgtattctttaactaaaagcaggagcaaattgtacaatggcacaaccaagatctgacaaatcggaaaataataaacagaactgacatgtcaaactcacatgggttttattttctccaaaacaaacagaaaataaatttcgaaatgctgacaataatcacctaacagaacccagtcaaaacaaagtatcaattcgtgaagagaccattctaccacacctggaagcagcttcaaattaaaataagattaattctcaaaagaacccatgcaaaaaaggcacaggcatgaatagcatttaatgtaaggacattcctccagcttttagagcagcaaataagcaaaagactaaaggcgtgaggcgtattcatagtatgcggaaatcacatgcttgtccttgtgaaatacagagttgtcaatgaaacaaggttgagttaaaaatatacttttggagtatgtatccaataggaacactatgagtatatgatagtagcatgtgcggagatgtgaatctctcagaacaagatatgaaaggttactcacgtcttggacaatgcatcaaatatgctttgagcttctggggtgacaccaacaccaattctctcggcttcaatctcagcttgtctgcacatgagccagaacatgaaagtgtgtgagctaattctcagcttgttagtaaggacaagcttgatgcaaaatgtagagtataagatatttgaaaccattaaacaccacataggtgaatagggacaggactgagaaatctatgacaaaatgaaaagttataaccagccatatgctaacacttaacaaccaaaccagtgtcacagagatacagaccaaacaaaataaaccaatgtcatgatatatattggctatgccacatacatcattagtcaataacatcagctgtcgagcaattttcactataactacactaaccagccaacaaactataatatccccatgtactgtgcttccatcaaaacataaatacccccaaaatagtaacttaacattcagtgtcgatgcaaaaatcacctattataagtaaacagcagaagatctcgaaattatctttttagtagataaagcaaacatttttctgagttcactagccaaataccaagtgcaaaaaatatttaaaatatatcataaattttaaacttgaaaaaggtatacttaattcctataaaaaatcatatttaatccctaacaattcataaaagcgtagaagcaaaagaaaacatttagattacagtttatgcttgaagaaaccaaaccatgacaagccagttttgaaacctggtttctaaaataagttaatagcatgagctcagagctgatacataagcaatttaacaggttggctgttgcaatattgcatgtctgtaattctacagggtgcactacagtcttgaagaagcgaaagtacacactgtcaaaccaagttttacagtcttcaatgctctcttgaaatccataatagccctaatagcccatatcccggaattttaaattgcattgcacacatgtctttcgcttcattgtccaatgaccagagtagctacagttcttgatggaaagccagaaggcaacaaactataaatctccaactcaaatacaaaatctaagctattataatctgtgaaccaagacaggttttcttttggggggtggggagggggctgcttgttgacagattcaatttcgactcttaatattttgatgaacgaccaagaacttcataacagtttaaacagtgtgattctgttctagatagcatggcctttcttctatctcccctcctgttttcaagcacctatgtgtccttgttcacttgctatcacttattctgactggatatccacataacacggagtatatcacttttaccaactagaaaggtcaggtccactgttgcgacagctatgacataagtcgctcgatgattatcacaggaaaaaaaactgaatttcacatttgcagtaattagtatctggaaaaatatgccatgtaacacatgtcatcaagaattgtatgatcaatctaattactccagcttcagcctgagaaacacatctgatagggagcacacagtggtagaacagggtcgagatgggagtgtgacgcacctgagagcggcctcctcccgggcgtggatggcggcgaggtcgagcacgcagccggccgggtcgagcgggtcgtcggccttgcctacaacggagaactcccggatgtagttcgccttgagcacccgcacgttcctccgctcacctctctctgccctccccacgccttcctgtgatctaccccgtcatggaaacaaaaacaaccgcaaaaagcacgaacaacacggggagcgaaagtggcagagcactgagatgggggggggggggggggagaaccggatggggagggatttggaaaggatatgaatgacgaggaggttggtcgggcggtcgaaggagacgatctggccttcgaactcctcgccgagggtggtcttcacggagatcagcaccccgatcgcgaactcctcgccgccaccctccatgtcgccgccgccgcccgccggtgggtagatgggagaggcggaggggaggtgggttgtgagattttgggggttcagcgaagaactcggccttgctggcgaaaaaaatctgcaccgcagtcactcacaactcggcccgcttgtttttccttctctcttcttttctcttttctttttttttttcctttccccgcctcttcctgctttggagtatttggtccctttgagctttgcatttgagcgagacatgacgcaaaatttcgccataggttcataagccaaaacggctcaaaagtcaatccttaaaaataaaatatgtatatctttagcgatttaaaagtctatcctttaaaaagactcccatcggatgtcctaataagttaaagaaaaagctaaattttaaattttcaaacttaattttgagattgattttgagatattttcaacgtagtttctttttcagcattgacttaactcactctataacacctcactagataaactaagtgcacaagggtgtgagagctcttgcaagggttcaagataatgcaatggagtgccaaaaccttactcttgctgctggggagtgggtatatatacccccaaccaccaaaactagccgttggaaccgaaatccccaactttgtgctctaccggtgagaccgccgttgtgaggccggtcagaccggacaactttgtaacggctagaaaactagccgttacagggcaatcattgagcccactcaacctggccggtctgaccgcagtgtagtggccggtcagaccgtccacggctcggtcagaccgccgtctgctcggtctgaccggttgcggctctggcggctctgtatcgccaccaaaaaccagaccagtgcaacagaccaatggggccggtcagaccggccttgccacgccggtcagaccggctaacagacccggtcagactggcctaaggcccacggtcagaccgcatgtcacttttcagctcaacctaccgttagtaaaacggcgatatctcttgactcgggtctcggaatttggcgttcttggactctatggaaagcttattcaaagggccatccaacccatgaaaaatccatccaagaaacacaacttaagtcaaggataaagggctcacactccaaaggatatccaccggacatacccacaagatgtcactcactcctattggacatgcccacttctctcttggtttaggacttgagaaaactcatcacacttggttagacaagcccacaaaatgcacctgcatgcatatgaactaatatggcacaagatcatccacaagctcgcttcatagacccctcttgatagtacagcgcctatctagtaaatccggactacaccaaacaccaagaccgggaaaagactaagaaaacattcttagctacattatacctttgccttgcgccatccatcttggggtcaagcttgagccgagatcaacacttgtgaccatccggttgaaccatgtttatgccgaggtcttgtctatcctttgtcaatactttattctcatcacaagtttgacttcattcttgccaacatgacgatgtccttggcttggtgaccactaacccatggtgtcattcattagcctcatcgtagtgggacctattccttttcacacctcaaaggagaatattagtctcaacaaatcggttgtcatccttcacttgatgaccaaccggttgcatatgaaagatatggatatgtttgttgagtattcattaacatcacaagtgtcatatactcgtatgcaatctcaagtgcaaagatccgatataaataataggtgaacaacatggatctagaacatgcacaataaatgtataggatttgctccccctaaatatatgcatacaaataaatatacaagagatgcaagtgtatgcataattagagaatgaccaatgggggtttatcctatacatatagagaaggcatatgtagtaatgatgtagagcaacataaaacatataccttcatgatctccatgttctcaatgtaaatgagactaaataagataacattcgagtaaacattagtctcacacttatatatcaataacatggaaatcatatatatgaacctatcaaaaagtaggagataaaaagtggtacatatcgttttatctccatgcatttcatccttgtcatgattaaggtccatcacaaaagaatgcatgtcttccacatctcattatcggaaataacctagtagacaacttatgcaaaagagaggttaatcccataaacatcggtttatcatctatcaccaaagtaacaattacacaaattgtttaatccaagatctttcaatcttttctctctttggtgatggataataacccgatataaacaatatagagagaggagatgaaaaatgatttcaaatcaagatagaaatcttataataaacaaaatatagaataagctccccctcaagatgtgcatacatatggatatgaaggaacgcatatgcacataatcaacaaagattaaataggaagctcacactatattttggatccacaagagaggccaagttagaatatgtgaagtttaatacatacctctcatcatttttacttccatatccaaataagactagtcaaagaaaggctcataaaaacgttagtctcatataattagatttgttattaatcaccgaaaccaaattaagacacttgaacttacaatgtgacatggtaagaaaacaagacgcgagccagcgaccttcctccggcaacatgacggtgatagcctacctctagtgagccccctccttctctctccggcaagtttcctccaatagagaaaataaaacttaggttagcagccttccttcagcggccccctttctcctcctttcagcgagcttcctctgacgagcctcctcaccatgttgacgcttggcctcactggtactaaaggtgtcaccctactcatcattgccatcggcttcttcaaactatcaaagatggttggataaggcaatgttggcacacatgtatctcccccttcctctctatcgccagcacaatgttgaaggtcaagctcaagttgagatctggggcgggcgatgtctcgctaggagcatcgataggtgactcctatgggtgccacatacctttccaaatacgatgctgacgtcctcttctgtaccttcatgtggtatgtgggctttcggggtgaaaacttagtttcaaatggtcgaaatagcgacaaagacactttaaatgttgtggccttcctggatgtgccgcattggaggttacatgtggtatggcttccttggtggatgcatttcccgtcgaatcagtttcgatgaatatacctgtgacaagatccgagtgagtgactacaactaagttattctccgatactatactttgctttggttcaatgtcagttgctggcagtggtgtgtgtgttttttttacggggagtggtgtatgtgatttgatcaacataataatcggacgttgattatagatatttggacgttgattatagatattttgttttcggtttgagtaagacatggtctacgtacaacctgtaaatcattgggaataaataatagttatgcagatatccaatcgactatagctaaaaaataaatctctacatttgaggtggtattttacgtagttttctttaatcattctatgattttgttcttttagaggggttggggacttctcccgttcatatgtaaaatagagtgacggattaacatacgattaattaagtactagataaaaacttatatatatatagttggaaaaaacacattgtttagtagttcgggatgtgtaggagtggaagttggaaaccttgagttaataacacaacctaagaatagtctacttcctccgtcctatagaaagactaacctaaaatgtgattgtggcgttcctagtataatagagaaaatgtcgcattctattttaggttgttttttagggacgaaggggatataccctaatgaaggacaacagatccatcaagttctttttaacaaaaaaaatgaatttactacaagcggaccctactttaaattatcaaaaattgttctgaagtttataaagcgatggagatggttatgtcccatgacggtatggcagtgtgcgaccagacactctgccgcaaaagcccgtctccgccgctgacagccatctgcagatccgctaaccgcaaaacacgggaaaccagtttgcagcccacaaggcccatctcagtacgggctccactccctaaccaaaaagagagagaaaaataaaaaagaacaacacgtgagagaagtccacttcacagccccgcggcgcatgtgggccgagagagaaaagcacgggcccaccttccagtgaaaagcaacccgtggcaactcggtggccgttgccaacttcccccgcccccgccgtccacggcgtgtcgcgcccccggcatcacgcgtcgcagcccgagcacagcgaccgctcacgtcactaccaagtggggcccacctacgcctgggcccgcaacgtcagtgacacgtgagcgagaggagcggagagggcaccgcgtaccgagccagccacttgtcaaatccgtccacccgcatccacatcagcgtgcgaggaaatcactacagacaccaccacttgcccacccgcaagtcaacaggaccccacctgtcggtgacctgtacgggtgggagccggccgcacgccgcgactgacaggtggggccacggagcggcggtccgcacagagagcgtctcccgtgcgggcgaggtgggccgcgggcgaaatgacggaaatgcccccgctttcctctcccgaggacgccccccgcatcgcgcattccccttcatcccaatctcgctcgccgtcgtctctctctgccgtgctccatataaccatctctctcctcccaaatccgcctctctctcttcccgaatcgcgatttttttctccatttctccaccaccccaccacagatcgagaccaaaccccacgccgggtctcctcctctgacccaatccccgaatccccaaatttgcagttgaaccaccaaactggtggagtcgattcgggcgaattcgagctccgatctgcggttgcgggagaggcgtttcgtccataccggcgcgggcgaggcgaattcgggcgatccgaggcgtatggaggaaggccccgcggatccgctgctcgggagctagggttaagaggcggcggctgcatcggcggggggcgggcgcgatctggtgatggtgcggcgcggcgccgggggacggcgaggagggatcggcggcggggatgatgcaaggctatgcatgggtggcgcgaaggcggcggtgagggttgcggcaagagtcggcgtctcgttcggcacatgtggccagtaactcgcgtagaggcagcagctccaccaccggcacagggacaagcttctcctcctccccgctcctctgttcctccgcccctgacgacctcgtatccacctgcgccgacgactcccccagcagcagcgcacaagaaggagcgtgttgattctccccgtccagcttcatcagattccttcttaaaggtgcctcctctgatgggattcgctttgatgtttacaaagcttgatgagatttatatgaaattgagcatgttgctgtgaccaaatcgcctttgtttttaagcctagataaacttatgtttgtagttacttatatcgttgatggtaacctgtggcatatcagcaaattttcaccgagtaaatatgggatgcatttgatggatgtattgggtgggtcgtgctatcatcaaagtagtttaagatggttttccatgtattatttgattgagtcttttggacagttcaatttgacaatttttggcacccctacataagatttgtgtgaaggcgtgttcttgcttgtgtgcatctcaaaagccattcgaacaattcatttgtctattttttaggagtagcatttcttggataatcactgggcatgatatatccaaagaatatatggctaaggggtgcatgtggcattatttttggatccgtgtgcagcccatgatgtaacttacggtttattaccatctatctctacatcttctaatacttgtttcattaatgtattgtataaaaacaagataataataataataataattattcttttcaaagttagaaataagataaaaacaaccggaatatcacaattaagcctgggtgcaagtattggcgtagacagctcgcattgaattatgtaaccatcaactttacatgatctttactttcagatcgaacaaattcaatggcatggcaactattgctatttctgttgcaatttgatttttagtgtgtattgtatgtttcaacaacaccatgataccattttcttctttcttctttctttatacaagtatgcttatatttcttctatgccaacatgcatttttcagtgttttcatatgcccaatgttattttggtggatacatgaattgtgttttgtcccttgtacacatgataatttttttattgaatatccaggacgggcgtgaattccgtgttggcgactgcgctctttttcaggctgttgaagttccccctttcattgggttgatacgttggattgagaaaaaggaggaaggctttcccaagttacgtgtaagttggctgtatagaccagctgacatcaagcttaacaagggaacacagctgtgcgccgcaccaaacgagatcttctattctttccaccaggacgagacatccgctgtctcactgctgcatccttgcaaagttgcttttttgcgtaaaggcgttgagcttccagctggaatttcttcatttgtgtgtcggcgcgtgtatgatattgacaacaagtgtttatggtggcttaccgaccaggattatataaatgtaagttctacagttaccttcctttattagaatcgttttctgtgctaaggtgttcaactcatgaccaggagcggcaggaagaagtaaatcggcttctacacagaacaaagctagaaatgcatgcagcagttcagtcaggtgggcgctcaccaaagcggctcaatggaccgtcgtctgcccagcaaaagtctggttctgatggtgcccaaaactgcggtctttccaaagggaagaagagggacaggggtgagcaaggaactgatccagctaagcgagaccgtgagcgtcccctaaaggctgaggatggcgaatcaggcaactttaaggtggagaatctaaagtctgaaattacaaagataacagaaaaaggtggacttccacatgctgaagctgtagagaagctggtacatctcatgcaacttgatcgaactgagcgaaagatagatttgcctggccgggtaattctagctgatattattgcagctacagaaagtcctgactgccttggtaggtttgtgcaactgcgaggccttcctgtgtttgatgattggcttcaagaagctcataaagggaagtctggtgaagctggtagtcctaaagaaactgataagcctatggaagatcttgtcctggccctgcttcgtgcactggcgaaattgcctattaatcttactgctttacaaagttgcagtattgggaagtctgttaatcatctgcgaagccataaaaatccggagatacagaagaaggcaaagtgtcttgtcgaaaattggaagaagcgcgttgatgctgaaatgaagtcaaatgatgtgaaaccagtggtatcaggtcaggctgtatcctggccaggcaaacctgggtttccagaaatttctagtgctggaaacagacgaagtggctcaagtgagtctagtctgaaaagcccagtgtctcagctttcttcatcgaaggccttgacttctaaacctgtagccgccgatgctgctgcgaaatcgagtccagtgatatctggttcttcaaaattgcaacatatgcaaccaggaaatgctgtaaccaacttgaaggagcaaccctccaaatcaactggtggcacttgtggctctgagctgcctgcagtgaaagaggagaaaagcagcagttcaagccagtctctgaacaacagccagtcatgttctagtgaacatgcaaaaacaatcggttcttcgaaggaggatgcccgaagctcaactgcagcttctggtgttgcctataaaacttccggtagttcttctcgtgtgcatcgaagaacaaacaatgggcttcttggttcagggatccagaaagaagctgccgtggcaagatcgtcttcacttgatcactcttcagtgcaggaaaaagtgtcacaatctggcacagcatgtgagaaaggagctgacatacaatcagatcagggtaacagccatagattgattgtccggttcccaaatcctggtcgaagccctgctaggagcgcaagtggcggttcttttgaggacccatcatttactgggagtagagcttcatctcctgtggcagacaaacatgaacaaagtgaccgtagagtgaaaatgaagactgaaaattccaatcctcatttaggcaatgatacaaatgctgagtcttggcacagcaatgatgttaaaggagcttcagtttctgaggaaggcgataaatcacctcgtgctatgttgactgatgacagcaagacaactgaaggagctggcagagatgtacctgtttcacgagttgcttgttcatcatatgcaaatgaaaagggaatctgttcaagtgagactgggctgactaaattgttcaaccctatgaatgctttgattgaaatcaagtactctgaagctagtcattccttgcaagctggggatgatacagcaatgaatcttcttgccagtgtcgctggagaaatatctaaatctgagttgatttcctcatctccttcgcctagaaattcatcagcaaatgaacagggctgtgaaggagacaacattgggaagctaaaagtggaatgtgatgtgagcttgccacagcatgcagggccatcaaatgaagttgagaaagtcatctctgagaagagtgaaaaaagtggtgtaggtttggttggaaaggagctgcaccgggaggatgttaatatgctgtctgtaaacaacttgttgtcacagggtgacaagggcacaacatctgctggatcgtcccctctaccagaaatagattctaaagcgaagactgaaaatcgtgaagtagaggacaccgataaatgttcacatccaccttcacgtggtgatgatggtgtaaagtcaaatgccaaacaacctattggtttcaagattgatacaaactcaaatataaaatcatctactacgagtgaatataggtctgcatttactgttcgaggtaaagttgaagatggttgtacaaccagttctgatgtgggctccacattaggtgatcaatgtaagctggctgtttcaaatagaaaaatgctccctgccgaggaaccattatgtggtggtgacaaacaagctcatggtttgttaaagccaacagatcaaaagcatcttctgggtctaccatattattcagaacacattgataaatctggtgacagtactgcaaataaattgaaattgaagccttcattttcatcatcgactgtggaggtgaataaggctgatggtttgctggttggtagtaacacggtgctgaaagaggatgaaaagaaggaacatccagctgatgttacaaaacttgctgtagcaactggagtcaaacatggtccagaaaatgggattagttctaaagaatcaaaagacaattccagtgaatcaagcagtcacacaagacctggaggcactgtctcacaggaaactgaacatagtgcacaacgcagctcaaagaaatctagcgatgatgcaggtgggaaagacgaccttgtctcatctgatgatggttcttcattctctgccaagaccaggtcaaatgccactgccaagcttgactttgatttgaatgaaggaatacctggagacgaggggcatctgtctgagccagctacctctcctgctgtgtgttcttcagcgattcatttacctcgtccttctccgtttgtatcacctatttcaagtgggctgcctgctccaatagctgctccagctaaaggcccctttgttcctcctgagaacctaataaggttgaagtctgagactggctggaaaggttcagcagccacaagcgcatttcgcccagcggagccaaggaaaatttttgagatgactctcagtgcatctggcattctggtttctgatgctgcagggaaaaaccgcccagcacttgacattgacttaaatgttgcagatgagcaatttcttgaggaagacgtctctcagagttctgttcagacaactggttctgaatctggcaacactagaagaagcaatggtcctgtacgtagtgttggctttgagcttgacttgaatagggccgatgaagttgcagagaatgggcaaattgtgtctaacactaaccacagggttgaagtcccattattatcaagaccattacctggagttttctctagttccgatgcaaatagctcaagggattttgatcttaataatggaccaactcttgatgaagctggtacggaacatgcaccaaggagtctgtcatctaaaaataccagtagcataccattcctacctcaagtcgctagcatgagaatgaacagtgctgaaatgagtaacatatcaccatggtttgcttctgccaatgcttgtgctcctgtagctataaagtcgtttttaccttctagaggagaacagcctcacccagtcgagacagcagctggaagtggaacccagaggatcatcacatcgatggcagatggtgtccaacatggaagtgatcccagccggactccagttatttcaacttcaccgactatgatgtttcaccctcctgcttatcagtatgcaggattcccttttactcctagtgtccaccttcaagcaccggggttttcaattgggtctacatcatatgcgaattctgcacctggaggaattccttatttccctacaattgctccgacgcttgttggcccagcaggtgcattacctgctcagcatactcgacaatatgcaataaacctccctgaaggaagcagcactgttggacatgacaataatcggaaatggggaagacagggtcttgatcttaattctggccctggaagtgtggatgtagaagtgaaggacgatagagtaactttaccagttagacaaaattttattgcgccaccacatgcctttgtggacgagcatacgagaatgtatcaaatgcctccaggtgttggaataaagaggaaggaaccagagggcagttgggatgccgaacgatcttcatacaaacaattgtcatggcaatgagcttttgctggtatcatttctcagcgacttcggcatccaatgagcttgtatgtgcttgcttctcgccttaaacgacctgctttgtttatcacctgcagctctttttcttttgatattaaggtgctgtgttttcatttgcagaggcagctgcatgtggtacttgggttcgtgtactgcacccttgctggaatatacaattcatacatggatactttccttgtgatgatgtgaatgtgagaggaacgatgctttgatgtaattgctgtaaatgttcatatttcatactttcctggaaacaattttccttggcattggcagttgctttgctagattttcttagctgtcagggactcaggcatgcttctaatttgcttgggagggtatgactggagatggaaacggtataggtcctgggcctcaagaaacatctgaagccgctgtaattaggttcagtttgtttgtttttagtttcttatgacagaccaattttctctttttggagcacatctgcagccttacatatgatttagatgtaacatgtattttatgtggaaacgttacatctgtttgcccatgtaactctagtggactatcctgggggatgacactcgatctgcagttcctgaatgcctgtaaagcgcattctggtgtatccatcggtgccttgcaatggttaagaaatttagtggaccgataagcaatgatctgttgctatttttcagtcattgaggttcgctgatggtttctaggcgctttctgcgaggcaaattattttgtttttcatgtcaaaaaaatattttgtttttgaaatagttcaatatgcaggtggttatattatttgctgcatgccttcctctacctgattacctccaaagttgttggtcgtcctcgtccatgacgcttcctactgtgtagatgtttgatgactagaatgctgttgtccatatttcctgacatctcgctgtggctagctccttgctggctggctcgattatgtatggcgtgtcttttagttcttggtaagcttaattaacctgattcctctactaattaatactaccaataaaaatcaactcaacggaatgtttacttccattccgaccatagaatgatcaaatagtctgctgattcgtgattgccgtacaaatttctgtaacctggctaaaatagtctgctgactactgtacaaatttctctaacctggcgaggaaatcaggaaagccaaagaaagattatactcctatgagcaattgaacgagccgaaggggaagagaaaacgaagcacgaaacggaagggaaatgccaagccaaaggacacggacggtcgctgtcgcggtccccgggcaggcggggcacactcgctagctgacacgaagccacgaaggcaacaggagagtgatgtgacgagctctggacgccccctttaatcacgcaacagcggcaaccgctccgcgcagcgcaggacggacgagacgtcacggcacggcacggcacgaggcgcgcggaaaagcaacaggagagaaagccgaaggcgacagggggacagtcgcgatcagttgtggtggtggtggccccccgggccgtgacaacgctgcgtccacccctccattctgccgctctcgcctcgcctctctctcctccgcttctcgccgagtcacctgtccctctctcctcccggtttattaaaacagtggagcactgtgcttttgctgctgctactgctgctttggaacagcagtctgcgtcgccgtcgcccaccgcacgttgcacgtagctagtccagtcgtgtctcgcgagtggctgccgctcgctttcatcagcccgtgtccctttcctcagctgcctgtcttgctataaagacttggactcgatcagccttgttttccccccggatgacgagtcttgagagtgaccacgcaacgtaagtcagcagttgttactgtgctaatggagacattgtttactcaaacaggagactcgagcttgcttggtggaattacatttttttaaccttataagaaaattttcgaaaataaaaatgttctaatatcactacgtagaataatttattttaaatatttagaaaaaaagatttataataataaagaagttgtacattcatgacccccactaactaaaccgggctcggatcttgcaataaataattctagcaatctgttatgagagtttaaagctaaaagtttgacttcgaattgttagcataaattcagcctgtttaaaaaatagacaggagaacttgtactgtgcagacagtacttttctctcactaacaggatttgctttaaacctaccaatatagcacaagcgcacaattgcgtttcttttcaggggaggaaattgtgctccatgtctttctttttttttctcatgggcataattaagtggagtcttgtggtagagagaggcgttggccccccaagctttaccttgtcaaagttagaaagcgagggtttgtttgttggtacggtatggttggtggggaaaactcctcccacttgaattattaacgcagcttgagccttgagatgcatgtgaacgtgatagagctctttgctttacgtggctgtggctaatgtactcgcgatgtgaccgtaaactcaagaaattcatactccagctgtcccaaaagttccctggaaacatctcacttcggactactgacttttataacttgtgcgtatggcttaataactgatcaccacgtcactgaataagaataaccaagtggaaattctgagcagactctgagcttcttcatgtgttgaatagtagtgatactaatccggggtcaaccatgtttgcgactcaggcaacttttttcttcaaactttcaattttttcgtcacatcgaacatcacatcgttctaattcctttaaaccttcaattttaacgtggaactaaacacagtctcacaaaccttcaattttaacgtagaactaaacacagcctcacaatagcaaaagctgaatcatttcacccacaaggcacgaaaatggccaaatgtgttccccggtcacatgtttgaccgaacctttacgcgacgaggcaggcagcaggtggcggaagacgcgcgtggctcgccaccgaaaccgaaacacactagagaagatcaccgcattggagtagtagtacaccagtacactactcccttcgtttcacaatgtaagtcattctaacatttctcatatttatattgatgctaataaatctagacatatatatttatatagattcattaacattaatataaacggaattgctaaatatttgttgacagattttttatggctaaatctttcactttctaaaccgttggatgtgtcctaaattcatactaacagtttaatacgcatcaagatatgtgcttttaggaagaaaaacaaaaccatatttagggatagatcatgtgacctcatgggatgaaggcgtgactaacccattgggctactatatttttatgatctagattgaacttacatcttatttatactataattacatgcgagtttacatatgtaattatagtataaatatagtgtaattatgaaaattacattgtaattatgttacagttacatttgatagatttttaggctaatttttaatcgaatgttgtatagataatccttaatatgaatgtgagaaatgctaaaataacttgtatcgcgtgaaacggagggagaagtacgcccgggcacccacacccactgaaatcgtttcgctcccatccgattccgcgccccacaaccatgcagaaaagcgagatctactacgggtgaccccaccacatggccgagggaagggagggacgggagatctaccccctagtgggggaataatgtttggtcccctttggtctctctctgtgtgataaaagaaagagagagcggaaaggaggagaaagtatgcgcacactctgaaaaggagggaggaggttgctgtcctaggatcagggccccatctgctccccacggcgagcgtgagtgacaacatgattttcctcctgtcgcttctctcgcaatgcggggaacagtactactacttcccagttcccagctggttaaagtggtaaatgcaccgtgataccatgagcctttgcggtggctcgtgacatcgatggtttgttccagtagtttgtagactttcaggccttgacaacatgcagctggtgggccaagaaaacgggggtggcccgtgatcatagggcgatttggcgtggggcacggccggatgggctacgtgactccaactaccactcgcgggccggaaatttcaactcgacgctggaaatagtgggccaaactctgctccgtacgaacggcggcggtaacaacgaacctcggccaccgcacctccgcagggctctgcttgtcatattgtcagctcgtgatatatccttggtaggcctgtgacttcagttacgtcggaactgtctcagtgctctccatttgatcccattcccacatgaccataaggaggagcaccatctttataagctatgattaagatacatatatatatatttatctaaatttattagtaaaagttattatattttggaacagacctcagccggatgaatatcaacggaaactcctcaacgaggacaacatagtattagtaactaccaaaagagcactgtaatacttgagatcaacatgatctacaaaatgaaacaaagcctttgcaacctcagccaggggtggatccagcatgggggcggcggagtctcgagcccctacactggtgtgaagactataagagctccacgaagactctgctaaattttttttaccatatgtagatgggaatgaactgtaactctatctaatttgctcagagctcactactatttttttttggatccgccactgcttctcaactgtactcctattttggtgcatcattcggaatgatactttcatcgatccgaacaacaccacacaacctcacgatctccacttgagcacccgccatttgttttgacaattgtatatacatgtacatatgatgccacgattataataaatgaccatggtgcgcttgaaaaagcagcatgtactatcaatgtactatcctctttggagccatgtaccgatgtcgtactatcaaaagaaaattcatttaggccttgtttagatgggtaattttttttatcatatcagatataccgacacatatttgaagtattaaacatagtctaacaacaaaataaattatagattccgctagtaaaccgcgagacgaatttattaagcccaattaacttgtcattagcaaatgtttactgtagcaccacattgtcgaatcatgacgcaattaggcttaaaagattcgtctcgcaatttacatgcaatatgtgcaattgattttttttatctacatttaatactccatacatatatccaaacattcgatgcaacaacatgaaaatttttgttttgggaactaaacatgtttgttttgttcgcttaggagttagaaccaaatttatcctattaaaatattagcagtgctaaatttggtaatattgaatttaaactagactgaatttaataacaaatttaaacgtgtactacatgtaacactatctatgttaccgaatttttaatatgaaaagaatacagcttaaatccaaataagccatacgactgtagtagtactgttatggtaccagcaatctaccacgtcgatgtcagcgcccgaggaaacgagcacacaaacacaacccccgcacagtaaaccggcaccgaccccacccgcagtgacagcaccaagcaaccgacctcgcccacccgcaccgcaccacacccacgccttccatgcgcgagccgagccgatccccggaaatgccccctgctttcctctccaaccacgaccgcaccgcatcccctcctctctctctctctcgacatcgcttgctcgctcgcgcgccgtctctgccgcgatctctctctctctctctctcctcccatcccctccgcctctcccctcctctctctctctctctctcccctcccatcccgaatcgccgaattctctctcccccccgcggcggatcgccaccagagccgtcgccgagctcgcccgtgtgcgcggctgccgaatcccccaatttcccgaccgaatcctgccgtaattgggggtcgattcggccgaattcgtgggggactccggttcgctgtttcatcctcctccgggaggagggaggttgtttcgtctggggtttgattgggattgaggcgaattcgggcggtgcgcttggtcatggaggaaggccccgtggatctagggtttcggagctagggttacggccggcggctgcgaagtcgcctgtggcggcgatctggtgatggtgcagcggggcgccgggagtcggcgaggcgggattgttggcggggaagatgcggggctatgcatgggcgacgccaaggcggtggtgaggggtgcggcaacaggcggcttctcgttcggggcatgtggccagcaactcgtgtagaggcagctacaccaccggcacagggaccagcttctcctcctccccgcttacctgttcctccacccctgacgactccttgtctgccggcacccacgactcctccagcggcggctcataaccaggactgggtcgattctccaaggcccgtgtcacccgactcctttgtaaaggtgcctactttgtggaaacactttgtaatttgttggtgttgtcgattcgttctttattagtttctatctggaaaatttcatctatgcagagtaattagattgcctgcctgcttgggacattcaagatttagtctagtacatgtcacgacgaaagtttaagtaaacgtgagagttgtattgggtggttcgagttaacttggatgctaacatgctaacgttaatctgccctataaaatagggttccttttcatgattggattggaacatgtgggcatctttgttttaccaatgtgcgttccatatgtatcaggtgtgcacaaagttgtgaacaagtgacctagattgctcttactattttggaacatatcaattgtctatcgtttagaggagtaacaccatgctgttttaggcattctacaatttttccaggcaaatacatccatgaatatgtattcaaaggtgttactggtcaatggtaatacataagtatggcgaggatgtagtggttatgttggtctgcacatgcagtgaatggtgtgtcttgcccatctggacgtcatgataacaatgcaattcacctactgtgtgcacacttcttaattttcctaatgtaaagcatagtaagcaattcccaacatggtagtaattatatttgatttctattccaaattacaatgatattgcagaagaagaaattgatattttgtttttatgggaagagtgtgtttttggggtctatatatggtgtatgttattgtagacaaatgcttggaaaaaccaatacactgtaaagcttagccttgcatggctatatgaggaaacaatgtaattcatgatgattatcttcatctgaagcatcatatacgttatcatacctcgctttatgggaaaattgtctacaccatggtaatgttgtgggccatttttaaagtattcagtgacaactacacaaggttattggttaataagcatgctctataccttgcagtcgaccaaggtcattggcatggttaaaaacacatgttctagtggaaccaacgtcttgttacatgtttaacatagttatcgttccttgggttcacaatcatgttataaaactgaattgtatagtgtttccgaaacacatggttgctttttttttttgtatgcaactttttgcttgtaagatactaacttcttgcataacataacaactgatccctcagtcatagagacctgctttgctccatgcttgtgaagtactaaactatcgtgtgccgtgcgaaggctattttctttacaagaggtaataaatcatttattgatttttcaggacggacgtgagttcagagtgggtgattgcgctctttttcgggctgtcgatgtaccccctttcattggattgatacgctggattgagaaacaggaagaaggttatcccaagttgcgtgtaagttggctttacagacctgccgacattaagctcaacaagggcttacaactcgacgctgctccaaacgagatcttctattcttttcaccaggacgagacatcggctgtctcacttctccatccttgtaaagttgcctttttgcgaaaaggtgcagagctgccagctggaacttcttcattcgtatgttggcgcgtttatgatattgacaacaagtgtttatggtggcttactgatcgtgattatataaatgtaagttctatattttacttctttttctgcctatttgtatttgctgcttcatgtgttcaacttatgcccaggaacgacaggaagaggtaaatcggctactgcacagaacaaggcaagaaatgcatactgccgtgcagcaaggtgggcgctcaccgaagcggctaactggcccatcagcttcccagcaattaaaggctggttcagatggggcccaaaattgcggttcatctaaaggaaagaagagggaaagaggtgaacaaggaattgatcaaattaagagagaccgtgatcgcacccttaagactgatgacactgagcctggaaacctgaaaggagacaatatgaagtctgaaattgcaaagattacagaaaaaggtggacttcctcatgctgaagctgtggagaagctagttcatctcatgcaacttgatcgaactgaacggaagttagattttgctggtcgagtaatgcttgcagatgttataacagctacagaaaaccctgattgccttggcagatttgtgcaactaaggggccttcctgtatttgatgattggcttcaagaggctcacaaagggaagtctggtgaaggtggtagtcctaaagaaactgataagcctatggaagaacttctcctagcgctgcttcgtgcattggcgaaattacctattaatcttaatgccttacaaagttgcagtatagggaaatctgttaaccatctgcgaagccataaaaatccagagatacagaagaaggcaaagtgtcttgttgaaaattggaagaagcgtgttgatgctgaaatgaagtcaaatgatgcgaaaccagttgtatctggccaagctgtatcctggccagggaaacctgggtttgcagaaatttctagtgctggaaacagacgaagtggctcaagtgagcctaatctgaaaagcccagtgtctcagctttcttcatcgaaggccttgaccgtcaaacctggagcgtctgatactactgtgaagtcgagtcccttgatatctggttcttcaaaactacagcatattcaaccaggaaatgctgtaaccaacttgaaggagcaaccctgcaaatcatctggtgggacttgtagccctgagttgcatacggtgaaagaggagaaaagctgtagttcaagtcagtctctgaacaacagccagtcatgctctagtgaacatgcgaaaacaattggttcttcaaaggaggatgcccgtagttcaactgcagcttctggcattgctggtagaacatctggtagttcctcacgtgtccatcgaagaacaaacaatgggattcttagttcaggaggccaaaaggaagctactgtggcaaggtctacctcacttgaccgctctctgttaccggaaaaagcatcacaatctgtcacagcatgcgagaaaggaactgacacaccatcagatcagggtaatgggcatagattaattgtccggtttccaaatcctgtccgtagccctgctagaagtgcaagtgggggttcttttgaggatccatcatttactgggagtagagcttcgtctcctgtgcttgcagataagcatgaacagagtgatcgcagagtaaaaatgaaaactgagaattcaaatcctcatttaggcaatgatacaaatgctgaatcttggcatagcaatgatgttaaaggagcttcagtttctgaggaaggtgataaatcaccttatgctatgctgaccgatgatcgcagtaggacaactgaagaagctggcaaagatgcatgtgcttcccgagttgtttgctcagatgctaatgaaaaggcggcttgctcaagtgaaaatggggggagaaattcgttcaaccctatgaatgctttgattgaaatcaagtactctgaagctagtcattccttgcaagctggagatgatacagcaatgaatcttcttgccagtgttgctggagaaatatctaaatctgagttgatttcttcatctgcttcacctagaaattcaccaggaaatgaagagggctgtgaaggagataacattgggaagctaaaagtacaaagtgatatgggcttgtcacggcatgcagggccaacaaatgatgctgagaaaatcatctctgataagggtgagaaaattggtgcaggtttggtcgcaaaggaggaacaacacctaggggatgcaaaggacaataaggtcacatcttctgggctaccctctccacctggaatagatgttaaggctgttgaatctcctgctaagactgaaaatcatgaagtgaggactacagataaaggtggtgatggtgacaagtcggtcacaaaacagccagttgatatcaagattgacgcaaaattgaatatatatccatctactacaagtgaattacgtggtggagataaacaatctcatggtttgttaaagtcaacagatcagaagaatcgccagtgtctaccagataattcagaagccattgaccgatctggtgacagtgctgctgttaaattggatgtggagccttcattttcatcttcgaccgtggaggtgaataaggctgatggtttgctggttggtaacgcagtgctgagagaggatgaaaagaaggaacaaccttcttccacttcagctgatgctacaaaactagctgtaccagcaggtgtaccatttggtccagaaaatgggattagttctaaagaattaaaagacaattccagtgaatcaagtagtcatgcaagacctggaactactgtctcacaggatactgaacgtagtgcaaggcgcagctcaaagaagtcgagtgatgatgcaagtgggaacgaggaccttgtctcatcagatgatggttcttcttttgctgccaagatcaggccaagtgctacagccaagcttgattttgacttgaatgaaggaatacctggagacgacgtgcatcagtctgaggcagaaacctctcctgctgtgtgttcttctgcaattaatttaccttgtctttctccatttatatcacctatgtcaagtgggctacctgctccgataaaagtagctgctacagctaaaggtccctttgttcctcctgagaacctactaagatttcagcctgagactggctggaaaggttcagcagccacaagtgcatttcgtcctgcagaaccaaggaaaatttttgagatgactctcagcgcacctggcattccagtttctgatgctgcagataaacaccgcccagcacttgacattgacttaaatgtagcagatgagcaatttcttgaggaagatatctctcagagttctgttcagacaactggttcggaatctggcaacactagaagaagcaatggtcctgtacgaagtgttggtattgaacttgatttgaacagagctgatgaagttgcagagaaccattttgtgtcgaacactccccacagggtcgaagtcccattgttatcgtcaagaccgttacctgcaattttctctagtgctgatacaaatggctcaagggattttgatctcaataatggaccaactctagatgaaactggcacggaacatgcagcaaggagtctatcatctaaaaataccagcagtataccattcatacctcaagttgctggcggtagaatgaacagtgccgagatgagtaatatctctccatggtttgcttctgcacacccttatgctcctgtagctgcacagccatttttaccatctagaggagaacagcctcacccagttgagacagctgctggaagtggaacccagaggatcattacatccttggcagatggtgtccagcgtggaagtgatccctgccgtgctccagttatttctacttcaccaaccatggtttttcatcctcctgcgtatcaatatgcaggattcccttttactcctggtgtgcaccttcaagcaccggggttttcaattggctcgacatcttatgccaattcagcacctgcaggagttccatattttcctagcattgctccaacactgttagggccagcaggtgcattacctgctcaacatactaggcaatatgcaataaaccttcctgaaggaagcagcactgttggacacgacagtaatcggaaatggggaaggcagggccttgatcttaattctggccctggaagtgtagatgcagaaataaaggacgaacgagtatctttaccagttagacaaaatttaatcacgccaccacatgcctttggggaagagcatacaagaatgtaccaaatgccaagtgttggaataaagaggaaggaaccagaaggcagttgggatgcagaacgttcttcatacaagcaattatcatggcaatgagcttttaactgttatcatttctcatttcacagtgacttcagcttccagtgagcttgtatgtacttgtattccgtctccaacaacctgcttgtttctcacttgcagctccttttcttttgaaattaaggtacggtgcttttatttgcagaggcaactgcatgtggaacttgggctctggtgtgttgcacccttgctggaatatacagttcatacatgaccctgtgatgatgtgaattgtgagaggaatgatactttgctgtaaatgttcatcatatttcatactttcctggaaacatttttccttggcttcagcagttgcactgctagattttcgtagctgtcaggcatatgcttctaatttgctccgatatgactggagatggaatggtatagccgtataggtcctgagccacaacaaacatctgaagccgttgtaattagtccagcttgtttgtttaaagtttcttatgacaaaccattttcacattgttgggcaaatctgcagccttacatatgattttagatgtgacatgtatttttcgtgtaaccgttgcatcagtttgctcatgtaactttatggactatccagtagactgtctgcagttcccgaatgcttgcaaggggcattctggtgtaaccatctctgccttgcagtcataagaaatttagtagaccaagaaataatctatttctgtatctttcgttattaagcttccctattggattccatgcgatttcattgatgcaaattactcctattttgcttttgccgaaataggagtaatttgcatcaatgtttgtcatgtttgtcctgttcaccttcctggagcctgaggcggtactgcaacggttgtgtacacaaattcgaaactattacttccatgtcatcctgcaacagttgtacacaaattcgcaactatgatcagggcgactgcacctgtacaatagtttagaaagtttatttagtcgctgataggtatcaaaggtgagtggagttgtttttcgttgtaatggaattattatatgcctttaagataacctcgaatcattttcttttgcaaaacagtttttcctctccaatcctatatttctcgacatgccgtcgtggtcagctccgtgctatgaccgtgagcccagaaaatcagcggcgcatttgcgtcagaatttatgtagcgcaatttagcccaaactacaactggagcctggacttctgcataaaacagtaaaacaacaaaacactagggacggcgagctttgtagttgctgctttcagttctaccatcgaatcataaaatgttctaatgacgatactgagacttcagatcgattacaaaatctgtgattttgtcctgacagaacggtgtctccttgttcctttggcatctatcagactttctagaccaacaagagctaataataagagcattgtgcggtacataagcagactagtttaaccatctaactctagtaattaattaccaaaagatgcaaatatacacaagaactttgcatctaactctaccagcacattcagactccaaaggttgccagcttgaggttgcacccagaacattgcatcatgtaagggacatctcgatcaatcaggatttgaagcatgacattttccttccacggaacatgttcctgcagttgtaaggcacgaaattaacatttaaaggatgccgtttcggactccatgccttagtttttctttaaatccctttttttttggtggaggtgcaaacgagaaattaaatttagaaagcaaaacaaaacatacaaatatacatcaagcatgcatctagggtgaataaacattcatggtcaattttttcatcgtggacaactgttaacaatcttgtgaataactcttagtaatacaaaaaagggcattcaccctttttacatggcatgtatttgatctgtcatgatctttaattaacttcgaccagaaatttcttttgcaatatatttctaccgacaaaaacttatgatcatatgtagtatgttgaaatacaatcaagggatatcacatttgcataaacaaacctatactttttagccgattttacaaagttttgactcttgaaagacaagaacaccacatgaatttggacaaagggtgtatatcataagatctaaacttatatatattgtaggacaaaaggcatatagaaaatcaatgtccatagatagccttacgagttacgaccagccaaaataaagagatcatggactcatgggataataagactcaccaccaccaccacaaaagctaggttcttttatatagacgggatacatcctaaagaagaattgcagtgatgcaaacacccatcacagaatcatatatacttacatcatagagcatccttgtcgtgatttctttttcttcttttccctctgcttagttggaggctggattactaccttgatagcagcatcaaacacacctttgacattctgcgcgtcatttaaatacaacaaagtaagaatttcagcaagtcgcagaattttaacggttcaaatgaagttaagactactacagcaagggcacaccatttcactatgactattttacctgttgtgtctttgagctgcactcaatgtaataagcagcacctatttgttttcgaagttcttcaccctacaagaggaaatatcagagacattttttttagtcatctcaaagaagacagactttttaaaagctagaatgtgtttcaacatttcctctcaaaaggctgacaaataaggataaccaaagttataacgctctggtttctcaccaatcaataaagtcactagagatatacctgtgctgtggtaacaggtatcatgccaggatggtccaacaagtagtgcttgtcttcacggagatctgtaagccaattaaacaacaagatgatttccaaaactaacactataattaacagaaattcaataagatactcaaaacatgatattagaccaaggttttgataggataccaggattccacatgccagcagaattgaaatggttttgttaggatacaaggattcaaaattccagcagaattgaaatggttttgacaggaataagaaatcatgattacaattggttttatgaaaactgctagtctatattcatgggttttgtactcttatctcataaatgattcatactccaacataactgactttcccattattgcgtataaagtataaacacataatgcatgcaatttcaaaaataacttcggagcatccactaagctgcactagaaagagcagttttagccttttaggtgagttccataccaacaactattttgtgaccagctatctagatgactgtctacacttttagtaagctgcactagaaagagcagttctaggtcagttcgttacctgctatttggttatcaactacaccgataattgtattgcgcatttagtaagatgcaccagatagagcagttctaggtaagctccttacctactgtttggtcatcaactacacataatataacctgtgtctacattacaaggaccactatcagtagattgaaaacctaattataaaaccactaccagtagattgaaaacctaactgaactccaaaccacagagacaaaaagatgctaactactacataaggtgattagatgtatatcatactacagccccaattcccatttctaatcatcgacatgcagtttaattgaaacaaatgtttttcttgtcaacaaaactcacccaattttgtgccaaccaacacaatgggcacgccgggtgcataatgctgtagctccggtatccactgaaagggaagaacaaagcacacaaaatacacatatcttagtattttcaaacaaacaaaaatataccgcaaggacaagtccaagaagtcaaaatggcacattcagtaccttcttcataatattttcatagctagctcggctcacaagagagaaggcaagcacgaaaacatcagcaccacgatagctcagaggcctgagccggttgtaatcctcttgccctggaaaagattgcatcatgttagttttacgttatcaaagaatcaccgaaacgcaaaattttcaaccagaataaataattgaaaaggggagaaaagaatcttgaattccaggaaatacaaagcaatcaaatcaggaactgaaattaccagcagtatcccagaggcccagattcaccgtggtgctgtccacaacaacgtttgcgctgaaattgtcgaacaccgttggtatgtagtcctgccaaatcaaatgcccgtcagatttttttttttaaaaaaacagtgataattatccaaaattcactacaagaacggagcaaaaatacccgctacaaggaaacacctccaacaaaaatataccgagaaaaatcgaaattctgtgtaacttcaagaaaacaaaatcagcaaaaaaaaggaagtagaggaagccttttgactccaaacgaaagttcctactcgtttggcaagaaaccgatcaagaaagatcaagtcttttgcacccaaaaaatcctgatacagcaacagggaagggggagagagaggagaaaacaaaagaaaagaagagaatgagaaggagaaagatttgctttacagtggggaacttgttgctggtgtagcagatgagcatgcaggtcttgcccacggcgccgtcgcccaccgtgacgcacttgatgaaccgggaggcgctggacgccatggccgcacgcacctcactcccgtttcaccgaggaggagcgcgttgcgactttgcgagagagagggaggagacaagatgggaggaggagcaaggaaggagggggagagggggagaagagttgttcgttcttggtggtgtttggtgcgtgacttctcggcgaagtgtttttaagaggggtcacatgcttctcactctcaccaccacgctgctgctgtgcctgtgctgccgttgcctgcctagagagtagagaagcgagcaaccactgcccttttatctcgctgtcctgttggtgcctagctaagctaccccatggaccgaccattggtatctcccttgtccttactccctgcttattgaatgttgttacggtacatcagcttcttcccccctcgccccctctaggaaagtcctcgaccataacgacagttagagcgttttggtttgataacaaaatgtgccataccaattttttttagtttgaatagtaaatgtgatgatttggtttgaaaccaaatgtttagtaatgcctatatttaatttggcacaattctaaaatattcttcaccacaatttgaaatttggctctcaattaacgtaaatccaaaaacactcatttacaaatctaccctaccaaaatataggtactatcaaaactgtctaatgtttggcactaccaacattttggtagggtactaaaccaaacaagcccttaatcactgctatatgggtcacatccttatattattcatatgtatctataacaataccatcattaaaaataaagaatattgctctctacaagtttgggcttaaaacctagagtattacgatattacaacagccagccaacaatagatagcgggatcttttgcaaacataaatcggtttggagattggaactaaagaaaagtcgagaaatgcttaggggtcttctgtctaaacgataacttcttcatttttctgttagtacgtttttcaaaccgctaaatggtgtgttttataataaaaacatatatacgttttttaaaaaatcagataaatctatttttaaaatgtataatagttaatatttaataattatgtactaatgagttaccacgttttatgttccgctaatacgcaactataaaatggaggttagaataggtctaagtggcatgtcatgcaaaacgcgcgggaaattcagctaattttctttaaccatgtaatagataaaatgttaatatgacgtgtatatagaagagcaatatgtatatcaattcataggctgtactaaattaataccaaagatatgtctcaccaagattgagttagctcatttaatggtattgctagaagactataatgattcattcaaagtatctaagactacaataatgcaaaaaaaagcaaaatcatatcataacggttcgtgcggtttgcctcggttgtcgcgagaaccatccttaccaacaggttccgcacctaaaaaccgttcaacaattcgaccaagtcaaaagagcaaaattttgattttattatttggtaaaagtttattcaaaatttaccttttttttggataaccaataggttatcgtggctatcaatgatatcaacggctagcggtaaccccgtcctaccctgcccacagattgctttaggagtatatgatccaatttcagatgaagtcatacaacaaattgtagataatagacatgatggggcctaatatatgattttgctaatgcaaattgtatctatccatccattcatctatctaccaaaacatctaaggccgtttcttttcccgcttttcaactttcaatcagtatatatccatccatataaaaacaatctcatgcagaaggtaaggatttctgcttcgtttggtgattcctgatgatgtcctttttggtgttggcatatcgggcagagaaagtaatttgtttcctcagatgctatggtttgcaattcaagtaaagtaactaatcttcttcatctacacacaaagaaaaaggaaaaaaaaagaaatataacttattattaggcatcttggtaacccctgcatcgagtgaattgactatttagttcctatggaaatgtcactttaaagattggtcattatagcatgttttaaaagcccatgattagggtgcgttgtaaattgttgttagatgatggatgaaactaatttatcacaattatttaaggccacaaatgattgaagtaaatattagaaattaagttaaagttgagtcttttctaagaaccaccgttgaagaaagtttttagaaaaatcttaccgattttaggaaccgtgtccatgataatctatcatctggtagctaaaaagaacatactttagaaggttattccgtaaagtcgaaatacatggagtggaagataatatctctttttcttagaacgagtggaagataatcgattttccttttatctactgcaatagtcaattgagtttagagttaaaattggatgtggggggatctattactgttggggcaattctcttgtaaatttgatgcttatatacttttgtgtttgatgtttagatggaaatagaataacgggtcgccctagctgtctttgctcaacattttgtggttctgccgttttctctctttccacctttttttgttggaagtttgctaccacgccatatacaccatgattacaattttgtaccgatttgccaaattaatcatttgtaaatgaaactctcattattacaaaggttgtcgttgtaccgccggaaagccgacgatgaatcatggtgttttgtcctttcgttcattttccaactcatccatcaaagaaaaagaagaccccttttgcaaattacccattttgcagagtcaaatcatgacaaaagcattcaccaacttacaaagtcaaatcacgacatatcgtatttagttactgtcttaatttgcattagacaattgcgtgtccgttacgatgagcacagaaccacagactaatggcgttagcaaacacttatgtggggacaagtacagtcgtatcaagaagtgtaacgccaaaatgccagactaatctagtttcatgcactttgttgatgcactgaaccactgatctctgggcatttcaagccgaaacacaaagtagtttccgttgtaaagtggcagtgtgtgtaaagcatcttttcgagacttgcagagctaaaaactactcacctgagctcttgttgctgttctgcagagacaaagcatcgagcggtgccacgaatgagaacgtggttatcttgtttgttctctgattatcttgattgacatgaacgaaaaggctcgggtttatttgatctacttgccaggtggtgttcttcgctcctaaacgccatgattactaatcaatctgacgtgttgattgtaatttagcacgaacgtggcatggccccgtcctattctccgaccatcacagtcataacaagattcagaaaaacaggccttttgcgcattggacatatgcgtggtttgtttctacatgtatgatggatataaacgaaactgattaagtttattacaataatttaagagcatgaataaataaataaaataataaaaatttgataaagcaaaatttttaatactcgtacacatttaatagcttgggaaacacgcctatgataatttataatccgtaagctaccgagtagatctgtaatccgtagcattactgatctgtaatccttagcactgtaatattccccttggcataaatatttataagattcgatcaaacttttaaaattataacaataactttttatggtactactacttgtttaagcaaaatgtcttatattttatgacagagatagtagtctgcgtttgtaaaatacaatagatatataatagtattataattccttttgagggtaatctacatatatcagttttttctcctaagaatttggaaaattatcaatggtgaaagtttcaaaagtttgaccggttcttatactcaacgtcaaatatttataactaaagggagtatcttttatgctgctactacgtaccttttttttaaaaaaaaagatactacacagtactagttatatgtgttattttcacttatggattatgcgtaccacgattatcaaattttgctttctctaaaaaaagtttatacatcggtgttgatcagatagcttattccgagatatttattaggtttgtatatataatatttaattcatccttataagcaattgttcgttgtttcaaatcttccataaagaacgcattcttagcagctcatgtcaattcagtaaacttggagtagtgcactctactcgttcatcagagctattacaactctttcgtccgactccaatagagtagcagctgtattaagttagtaaccatacaacgctgtactaagttaaggccccgtttagtttacaccaaactttctccaaactctcaatttttcattacatcacattacatccaaaactttcctactcacgtaaacttctaactttttttttcaaactaccaactttttctaaacttctccccaattttaagaactaaacacagtcttagtaatcgtgattcgtgattcgtgggcggcagcagctgtagtaagttcgtaaccgtacaacgctgtgctccgccagctagtggagtaactgagcaccgagaaccttaggccaagccaccaaaagcatggctacagcctacagactgttgtcaatgtcaatgccaatgccgtttgcgcaatgccgctgcgcaggcgacgctggtgccggttgcctgcccacccgaccgccaattactgcgaccgcacgcacggcaccgcgagactcgccgacgcagacaccggctgatgcgcgggcgccacgcccacgcagtaaaacaaaacacacccaaaaactgatggaaagctgtgtacgtgaccagcgtcacatgcccgggcgcgcgcggaattaaaacgagacgcgccgcgatgcgcttgcgcttgctgcggaagcccggacgtacgggcggcgagggcgacgacgcgcgcgcgtcccgtgacgccggcacgatccggtgccgggtgctcgtgctccccccctcgtcgaggcgcacgtctcggttggcttgcgcccggtccgcgtccggtcccgagtttaatgcgtacgtgctgggtactagcgtaccacaccaacacgagtacacgacaagcggcacgaggggcctctagtgttaggacgggccttcctcttgccatgtgtgctttgttcccttcctctgccgtctgcccccttctcttctgcgtagtctcttcatcctctagccaaagattagacacctcctcacatctagctttatttgctaaaatgtgactagcacaatcttgaccacagtggactttctgaataataatctctctatttctacacataagagcattgatctccctggttataggccagagtagatagatctctctgcagattgcagcatgcgtaccgcttccaagcaatctgattccaccacgatgagttttagagtccatgaatcgccaaaaacaatttcttccttacacgccagaagctccatttccagtgcatcatagcacctttcaaaaaatctgcaggaagaaaagatgacagttcctctctcatctttcaagatcgcgccaatgcctccattctcatagttcggatcaaatgagccatctacattaagcttcatccatccaggctgtcgtttcctctatttctgaaccaaagcctgctgagtacaagccttttaactgacggccccgcgagatagctaacgacatgtcattagttatgtcagttggtggaaggtgcatggagttgtgaggatgagaaatatttcgaacttttttatcattatgactattctttagtactcttgattaaattttaagataaaatttaaacgctgaagacagccatatttttgaatagagccagaaagcatgtgtagtgcctactggctactgcttagctgctctattagatggcataggatgtttgttcgggccctggccctctctaggatcaagcaacatttccgtctttgccgtatgtcggggtagatgaggataagggtagctagaggcgattgattattattcattgtctttgaagatgaccgctgttttgttccaagatgccaatatggtactgtactactttactgttagcatgtacgttgccaccatgttggtctttaattttggcggaaacggggccggcatgtcaagtttcaagtttcacggtgatggcgttatgggaggagacgcccgggccccggagtccctgtttggaactgttcttcaatcttgttccagtggtagtggtcgactggtcgacgtactgttcaatttcaactaatgtggtttgaaattttggtaagcttactgctggtacttacttacagctccggtcctttgtcaaaaataaatagtactaactgctctcccagtccataaatataagaagttatacatttttatttgttcacaaatataaaggatttgggttcctgagacatagcttttgtactactgttacatccgtctcaaaatataacgagcttagaattggacacgggtataaaaaatatgaaatattatgattagttgagaagagaatatagataaaaaaattatatttagggacaatcttaaaggttaaaaattgttatattttaagatggaatcttatctactcctacctctttatactagtctattcctcaactatgggtgtgttcggcacttcggctgccctatttcagctatgacacagccatgttgcacaataatttgtgtcactacaagcagctgtgtggctgcgttgcagcagctgcaacgtgcaaccgaacacaccctatcataattggtagtactcacttccttctaaaaatatactccctccgtttcacaatgtaagtcattctagcatttctcacattcatattgatgctaatgaatctagactgttagattcattagcatcaatatgaatgtgagaaatgctagaatgacttacgttgtgaaacggaggaagtaataatctagtattggattggaggtattgtagtactatgaatctggataggatgattgatcagattcgaattatagtagattgatatattatgagacgtatgtagtactacttaattcctctaattagtattgatgtgtcattttgttatttctttatttttttttaaaaaaatattttttatatttgtggatggaggtagtacaagcaaccctgtgcaagttcaaatgttgaagctcaaaaatccttacggcctgtttggcaagagaagggaagaggaatgagagttttaaagatggagttgatggtgggattggtcatggaagttacatttttacaccccattccttggatggtttcatatcgaattccctccaagtctcacgaattaacaggcctccctcaggtaagacattggtgggaattggaccttttaattccccatcccaaaccccctcgaattcctaagtcttccaactaaactacatacttaaactcccagatatcataaactctcattccccatcaccaactccctccaaccaaacaggccgttagtggaagagttgaattatgcctacctacaagcattccggtttccagactgtcagcaaaacccggtggatatcaggatatgcccaccatatattgcagcgatgccagtacactaccaaaccgaaaacgaccggccaggccagcgaaagctttcggtaattactcccatcaaaacaacctgtgaagcactgaagcagccacatgattgccgtacaagccattgcaacatcggggtttttaagctggtaattgcgtctatcatgtctttgcgacagcacagtgaccaaccaccacctaacggcgacagcacatgattcgtacactgcatattactattagtatacagtaatatcaaagtaaaatcgtggggattgcatgatgatgcaccaaccggcagcaatggcgcgaaagggaagcaagaggaaatggcgccagattttgccttttggcacggagggatacgggcatacggctggagcaaatgcagaaacggagaatcggcgatgccacatgggcccagctcttctcgtttcagctggaagccagctcctcgtccatagcaatggtgagaggacagctacggcatcagaggccaagttgacaacgcaccaatggtaaacagttacaggagggagtacagtaaatataagaaccgtcagagtgatgaccactgcaactttaacaaaactcaaacgttaaggtttcactttggctgctgacaagacagggataacttctgttatgggatttgatggtgtttggccaaaatatgaagtatgatctcagctcactaatttaatgtaatgtaatgaaatagaatcttgtttattgtaaccactatcgctttcacgatgactcgtcgctagtaacaactccacctaatagtgatgtgacgctcgtttactcggagccttctttttggtgaagctggacgccaacagcactttgccgtccagaacgtctggagggctttcaattcgtaagctgaggcttctcgcgggctgatgctaatcaacccaatcaaaaatgtggcccaagcagggccaccaaatagccgaaggccgcatcttgtccccattaggtcttcaggtcatcagacattgccgacggtatacagtgtgttgtcagaatgtcctgtgtcgcagccttcgcagtttttgtctcaaggacaacaatctgtcaaatcatacattagttaagtaatgtcagccaaactaagggcccctttgaatcgcaggatagaaaaaatggaggaatagtaaaaacacatgattctgacaggaattgaagtgtaaaaaatatgattgcaaaacacaggaaaaacacaagaatggtcgtttgattggagcgcaggaaaaacacaggaatcggatgagatagatagactcaaaggaaattttctaagaggttggagctcttgttaaatttcctccaaaatccacatgcaatgtgccattccataggaatttcaaaggatctggaaagcttcaattctttaaatcaaagggccaaataggaaattttcctatgggatttgaatcctatgaaattcctacataaatcctttgattcaaaggggccctaagcaactttttttgagtaaaaagtactagctggtagatgcaagttttcgaagggattttaatatgtggggttgatatgcgagatgtttatagaaaggtccaaacaagaagggacctggggatacctggtcatactccagatcaaacttcaagaattcatccttgcaattttcaaccattgacactaagttcttcaaattcttcacaggctgaccattgaaagcaaggacctattgacagtagtaaacatgctttatcaccattcaccaaaaataaggatggaaaggcattacaaatatcatagtgctagttgttttggctttcagaaacaacaggagaatcaatgagatcttgagaattgtgatgcaactttcagacgttgcagtgtagcactcaatgcatagacacgaaggaaaatatattaattagacaagaggactaacaacaaatcaacaaatgcatgttaattgatagcattatatactgcagatatatatagcttcaagccttaaacaacaatatgactggagcaagccaacagaataaattaaaattgagtaatttatatcagctgactgtttgtattacctgagtattgacaatctcttcataaccgatattgatatctgctacaagcacctgcaaagagatcatagcatgtcattaagttaattaaagaaccttctaaaacctagcctattatggaaggaaatgattgcccaagactaacaggaacttctaatgaacaattaagcatgaagaactcataacctgtgataccaccaccagctgttcatcaggtgattgggccattgcatgtaaatgcttgaccaacaacttgacaggtgcatcatattcatagtcctttccatactggtaagcaacacagaaaagctcagagttaaataaataatatcactgaacagtataagggctgctatagctaggatattgtaaaaatgatttagaacattttgataattattcgatacaatagaaacaaaatgaaaagggaatgtagatataaacctcggatctaagatatggaacagaaactgcagcaaaaacaaagccagcaacaatgtaatatgatggtggcctgccctttacatgagctgcaacaagtctcttatgtgttgctagctttattttaaattcatggactttcgaattgcgcaggactttaactagagccttctcgccagtatatttctgggaaacaagataactgaagccaatgcgctcgccgtgcctgaaaggaactggttacacaacaagatttgtcagaaaatatgacaatattagatttattttctaaatggttaggaagttgacatcaaaacttttcaaatgtaaacaagactaattgtttaggctctacatggaaatttgacaccttgtaaatgaagtttttctaagctatctagattatgacttcaagaaattcatgtagactatctattgccagagcttaggaaatacagccatacacaaacaataaatagaaagtaaaaaggcaaatgcaggcaacacaaacggtcccgtacaagtctaacaaagacttaaaagacatgctgataagtcatgtatgaggtgcacttatcaaaattacagggcattggatgcaacaaacaccattccagaaaagagtcaaaagttcaaggtttgagaaagtgcgactgacctgtaccatcattggcaatgtcaataccatcgaagctaagaataatatctgatggttgcaggcatccagactcaggagcagttggttccactcttcgaacacgaacacccttttgatcaggtttcattcccatcgctttgcggagatcaggattctccattttctgccattctattccaagtatagggaatcctgaaattataatacatgaagatattaaataacggaaccttcaaaaaaccacgtggcaaatgtaaaataccagaaagatagaagtggtaaccatagactgggtgtcatttaaaaggttaacatgagataaaaaccaaaacaaccagtatttattaataataaagaaataactgtcacttggctcaaaagatcaataaggaaaatatactcttcaaccaaaggaactgcaaatattggataatgcattgacaaaatgagaacatgaaaataaactatgtagaacttcttttggctgtacactggtcacaatcaatttatttcatgataatgaaccaacattagagcacatcaatcataagatgaccacggaaatcattagaagggagaaaactccgtatgaggccatttgcgaaaataaatcaatcattgtccaatgctggttcggtcacaaggaacagtcagatctgtaccaagctacagattatgcctatcaatatcatcagtgaattatactaaactggttagttataggcacaaattaatacccaaacagaggtaattatactaaaagaaaagaagaagggccatgatcatacaatagaagtaaatggcatattcatgcaattaagttgtatagcatttacctgtatattctccagacttttcatagtcttgaatgaaatgcataataactggggtgggtatcacataacctatattctctgcatcttcatgtttgagagattgaaaagctataccaacacatttgcccctgtcattaaaagctgggccacctgaatttcctgagttaatagctgcatctatctgtccataaaaccccaaaagttaaaagacttatgatttctcaacatgttatcctcacagataatactattctaaatgagaattgtggggagaaaatgaacctgcaatcctagaagttctgtagaaccgtgaacatatgaaagtatctctatcctggagaccaccccacttgtcacagatattgtgtctcctccaattggataaccaacaacagtcacagcatcctgaagtgctggcagtgatccaaactcaacaggcaaaactccttcccagaactcatcatcatcgacagttaacagcgctgagatcgatcaaccattacaaattgagaccagataaaatatgaaattcatttgtctgtacacattaaacaaatagagcttccctgttttaatctacaatctattcccagaagaagaaaaagcaaccatacattctcctatacctattcttgcaacaatggcattttcaaattgaaagtttcaaacctgtagccagttccaagagctgacattacccagaaaaacaagcataagtattcatctttacaaaatatgatcaatgttgcacagggttcagcattctcaaatccatgttttccgaatatgtggaaccctattccaaatgctattatttctccactatccacaactagataccagtactcgggccacacaccatgctattggagcaatcttaggaagcattggataagtactacaattgcaacaattgagaaggaaagaacaatgcaggttgcagcagagaaggggaaatcataccaatgtcgcactccgtcccaatggcgaggaccgtggccaggtacttggtgtcggagccgcgcttcttaagcttgacctgggtgtagtgctccacggagtgggcgtttgtgaggacgcgccggcctccgatgatgaagccgctgctgctggagctgtactgccgcttcctctgccacggcagggagaagttgggctccgtgtgcacgcagaacaccttcaccacggcgtccatggacggcaccaccctcgcgacctcgtcccagcccacgggtccccccgcctccaccaccgcgtcccctcctccattcgccacgggcttcgcctccccgcggcggggcggggacggcggccgcgacccgtccgcgtcggccggggcctcgtggcgccgcgacttgcggccccggcggcccgcggcggccggcgcggggttgtcggcggcggtggaggccacgggggacgcgggcgcgtggttttcggcggccgccttgtgcttgcggccgcgcttgcgcttgcccttggaggtggaggagggatcgtccatggaggcgggctagggtttcgcggcgcgagcttgggccgagccgacgaggaagaagaggaggaggagaggatggctcggtcggacttgttatggagaggagtccggctcgaccgaccgacggtgctatcagtttacgtttcctaactgggtttacgtacactagagtacgtttctcttccagggttacacatttgaaacataggatataatattcccgacctgaattatcgtcactttcttgtggtttctgaagcaatcatgagttaggatgttatttaaatttttaaaactaagggcttgatgaattaagatattggcaagggtgttgttctgatggtctggataaaaaatcagaaattctcttttgctgttcttattatacaagtctggtttcctcaggtgagtctgatgaagagaggtaggtgtcaattgcatataagacgttgcagaggtttcagtgctacttatcaatgatccaattagacgtttttactgcagagtgttaagcttcatatccgatctaaactgcttcttttttatactccctccgttttttaatatgtgacgccgttgactttttctcacatgtttgaccattcgtcttattcaaaaaatttatgtaattataatttattttgttacatgttgttttatcattcatagtactttaagtgtgatttatatcttatacatttgtataaaatttttgaataaaacgaatggtcaaacatgtgagaaaaagtcaacggcgtcatctattaaaaaacggaggtagtatatactttgcctgtggaattatgatgattacaggttagattattatagtgctatatctgaaactgaaacttatcatgtgcaatttctgaaacaattgtgactactcactagatgaagggcaaatgttaataccatttctatttgttctgttagatttatttccatttaaattcacaatttgaaatgagacgctccttttttttttctgaaattgaccgtttaaggcttgtaactgcatgatcaataattatgtatctgaaagtacagtccatgatcaatattaactgtggctgatttgcatgcttgttcaaaagacaatatcaactcgggctattatttctttcatcgttcatcatgcagaccatgacatatgcctaactttgcctacatgacatcgattgatgcttccattatatgaatttacttttaatatgacaaactacacgagctgattgccaatatgctgcaatcttttttcctttttttttacatatgttgaaagggagatctggaagacactactagcatcgaacattcgaattgaactttgttatcaataagtttccaggagtagttatacatcatttctgagttctgaagtcgtttcaatgcaggaaaagcaacatctttgcctgcattactactactagtactaagtgtactcataagcctgtcaatgtccatgacctttcctagtttgtatcaacactatgacctcatgaatgacacaatgcttgatgtgcttgcagacgtccaaacagtaggagcatgttatttggcttaaccagtccatcagaagtggatcttaatttcaactgattagcattatggacagtgtggttttagcagcaatccacacgtgcaaagcatatgcatatgcgtactaccctgaaattcacaattggaacctcacttgtcgtagctgaattgatctgttctacctgaatcctaagagtgacttggcccaacaggcaacagcccaactattcctcgtcaatccgttagaatgtataagcagaagcggtgtgcttcatggactttgcataggcttcagattactaataaatcgactgtctaataattttttggctttcctgtctttcatatgtaatttatttcgttaccttaccatctccgttctgcagctgggcaccttgtaaaagcatcaattgcacaaagtgaaaacaaggtcactgccctacatgcagtcttgtgctcctggctactgtactgaacactgttcccaataataagtggtcagttaagtgaccacgcatcaatccaccttgcaagtttcaactttgcaagaggttaactgatttgatggcagctaatttctcaagaaattggttagtggtagaagtagctactttcacattctcatctctcacaccctatgatatgaccatcaatggtgtttgatgaagaatccataggccagactggccctatggtaaaggaagaacaagttttgatgccccccttataattcttctagcttttccatgtgccttcccttctgtaaagatggtgagaactgagaacaagaacttgcagtgcgtcagtgcttgattgatgctgcatgagtagtctagtggtagtagacacagacacttagtgatggtgtcatgtgcaaatgcagaccccttgtgtattgaggtgcatttgactggctgtttgccaggagatgtaaaggcatgataatcagaggcctgataaaccttatgacatctgtttctactttactgtatatgcggagtactaatagtacaataaattctcctgattatagttaacacattgttcatccttctatgtcgtggtcagggagaaccacaggatacagtgctggattgagtgatcaattcagactttcagtgccagtctccaggtacataagcagagtgaagaaaggtcagtgcagcggtgcaagccataaaatcttcgtttaatcaccagtggggcaggccaaggtaatggaacagtaacttgtcatacggagaagtacgagtacgtaacaagtactgtgactgtcctatctgcaggagactgcgcaacggtgtgctgtactgaacggctgtattcttctactactgtactggagcagtatcttcagagaactctctgcttaatcatttggaagcatgcttcagtcaggtctaacgttatcattggatcttgcttttttcaacgactgcaatttggagaggttaaagtcatactagctgtgaatggttgtccatttacacatggaagcatctgtccatgcagtactagcagtagcacctgcacacacatctttctttggtttctgaataatgtaacttcatgcatgtcaatgaaagctgcatgcatgtgactatgtgtcacagtcgcagcttgcaagttgccactggattggataacgcatatgatttgatagctgaacactgttgcagtggaggtaagcaccacaaggttactggggtacggtagggagggcatcattcaatgacagaaagttatcatttttatgttccctaatgatgtgctctttcgatctatacaaaccattatcctctgaacctgttggaactcatccagggaatcatgttcttatccaatggcaatcgatctactagcattcctggattcaaatggaaaagatgctccctatctgaagaaaaagagaggcacaatcctaatccaaaaatgttgacacctgcaaagacaaagctaacttagttggcaaaagctatagtattatactatatctcatcaatcaacaactctcacagggctacttgccaaggcacaacatttcttgatcagttcgttgatgacttgatgtctccatgatcccttttccccccgtaaaaacaaacttctgcactattctcttcgagccccacacctcaccaatgcgccaaaaaaaaaacactatttgcaactgttaaatgtggccacctataattacatatcgtagatatataaggatccatatattatttatacataaatgacaaatggttaaacgttaaatttaagagtgacaaatagttaaatcttttaaaaaaaggagtcttgcactatgcagtttgtatgctgagtttccaactaaattctccccgcttctgctgctctccacagtactgagcagagcaattttttttagataatgactgagcagagcaatatactctacgaaaatgaggtgtcggtcacgtgatcgtcttggagcttttcgtttgatcgtttcgctgcaaacatggatagtgttgatgaagtaatcaaatgctggctttgcgatctgcagttctctgcacttgggacgatctgtcttctgtctagtcgattcgtggttttgaccaacgcaaccctgaaccacccaccccccccccccccaatggcccaatttgcttcatgtgtacggcgatctgcgatcgtatatctagcattactgcaagcttgattaaatatgggttaataacatagtataggttttggcgtgtgatccttgaactataatgtaggctgttgaagtgtattatcatccggaagacgggaagtgaggtaccaaatctaagccgttaatccatccaaatcgagcaactattgagattgggtacctgtcgataccacaaccatgcttactgggtgctgctccctggtaaatgggtaaaaatagacctgttcggcggccgttttcgtggctgcggcacagccggcacgaatagtattaccctcactgtgagcagccgcagctgcagccgtggtagccgcctgctgaacgctcccaatatatttttctcctttagtctcactccacagtggaagccgcctcctccaatgtcacctcctcacggcatgagattaatcagaggccatcacaacataaattatcttttacacctagacacaatcacacctaaatttatgcatgtgtcttaaaaaattatagagaaaattgtaacagtataaattatgataatacaagtcactacacaacacatgccagtctaaattcgatctacatatgaagaaaaaacaataaattatatttgtgctgcatagagcactatttgttgtctagtttaattaattattatttttagttgtagatcgtatttagcctgttatgtttgtgtacaaacttatgtcattctaatcgattttactattttttaaaaactttaatatatatttaagtcgcatgcacatataattttataactattttaatcacatgcaaataacaggtgtgattgtttttaggtataaaaaaaattcatatctgtcaccccagccgttagccggctcagagggtctcatctttcggtttttgaagtttcttgcattcgagagccttctgcttctgtttctggtggtgacctcttcggcattgttgcatttgtttgaggtacaggggatgaggacaatgagaaaatccagtagcaatatgcacaaatgcatatcccttgccatccctgacgcccataccttcattccctcccacagcatctgcattaaatcccatgtcctggaattcctatcagaaacaaggaatagaaattgcaagcatgtcgtctcatattctagtgttggcataggctttgcccatgagcggatgagcccgatggcaacatttcaaagctcttgcctctttcagcacaagtccctctcaagggaacagacaagcagatggatactgaaatacatatgggaagaatgcatgatcacttcactctgttgaaacaattcttgaatcttgattggtgttctttcataaatttgggtttaacgtgaaaaatagaaatattctttactttttcataccttttgtcaatctggttagataaaacaaaagaaaatatggtacagagacgacacaatagtgaatttgtatgtgtacaccttccatcacttttgtagaggctgcaacgatagaaactgccctatggcgtgaggcgggcacgcccatctagccacctccgcccgaaaaaagttgcaccggactttaggacacatcacctttagcacccctttttcttttttttctttttatcctgtttgtacataactgagatgctcttgtgaacggcgatatcctttatcttaatactagcttatagggtcacgtattctcgcaacctttaacctctctttatattaaatgtgtttacttgtggtttgttgttttgagtaattagctataattattatagtaatttacaacttaagtagatgcgtttgaagaatatacttggcataaataatattagcagatttatcttgatttgtaagtaacaatattaagatcacatctaataatataccacactttcacgcccacacctccatcattgttaaaattttaaatgtgtcatttattgatatgaattaagcattattaccataataacaaataattaaccatgtgattatgtcaaacttctaaactgtatcacaaagcttatatatttagttgaagcaaatttatttatagaaattttaccatcgccatgtcatcatatcaaatttgttatgcgtatgttgtattgaattcaagtttactgtacgcgttcagtaaataaacccaccactttgcgtatgtcatcaaccccaccacctgcatcattggtcactttttaaaatacaaaattcctaagagtttctaagtaagtaaatggatcagagcaaaagcatatttgaaaaaatattgtttatttagaggaccctagaataaatgatcttataggggtgcatgtgtaaaattgacaagagaataaaaaagctcagatgagattttcagccgaagacacttgaacactcgtgatagctctcgaaccttattttggctcctatcggatggcctattcagtcaaagaaaaaactaaaatttaaatttttaaatttaattttgacattgattttgagatattttcaacgtagtttctttttagcattggcttttaagtcatcgagaacacatatataaaagtttacctacaaattcatttttattatctaataagccgttttggcttattaaaaaaaagccaaacgatgaggcccttcccatcatcgatccttcatccgatggtccataatgattttagctattctgtctccttataaatccgatggccattattaatgaaatgatgtggcttattcttgaatcatttaaagtttcactttttactgactagaaaaatgcccgtgcattgcaacgggtgaaaatttattttaatctcattattgttatatggtttagttaagatgaaattcactgtgagagttcgcttggatatgttagcatgcgagtttttttaaacatatttctcatatgattccttctatattaccaaaagtaaatgatcttaaaaaccgacttatacatggatgacgtaccaaaataccggcaaaaacatctttaatttttataatagtagagatagagacaaagatacgtgctctgagtatccctgcccccctatcttcaattttttttctttcatcacttttctacctgtttatattcctttcaagggtggtgcaaagtttcaatttcagtcatagaaaaacaaggtaagtgtgtattaccatgtcaaattcaaccttattgtaggagtttttagcagctacattttcttttagaatctcacttacaatctaaaaaattatagttacataggtttgaaatatatgctagaaactaggaaaacctagtttctccagattttcactagttttattttaaatctcgagctatccaaataaggtctcaggcatttaatctaatagattgtatcgatggcagagggcctccataaaaacgtgccatttgaattctcttgtgcctaatatgacctaccaagtttgaagttgaacacataaactctctaacctactgccatgcgcaccaccaaaaatgggttactgcgcatattgaggtattaaaatttttagtgtaaaattttaacacctataagtactctctcaagaacgtaaaatttcacaccaaacatactggtaatgaaatttattgagttgaacatggtgcctatatccttgccatgctttttgttagcgagctgggatcatcctgggcaacgagaaggtacaaccttcactcattggagtcattggctccctgcagggattgctttgctccccatttgacaccaattccagatcgaggtaaggtgaagtctcagacaaagtggcatgcaatcatgcatgcttacgactcttggtattagctttctggtgcgagtgaccgatggattcggatgcatatatagtgcgcgtgtgtggatcaaaatgatcgacaaatttaacactagggtggtacatctgcgctaaaagacacatagtgcctaaaaattagctaaagcctggaaaagtaatacgcaaatgcagcaagttctgttcaaccctttatttacaaattgattgcatttttggagttcttagagaaaatctgccttttgttaatgacatttctctacacggtccttcacatatttacacatcaattcgtttgccttacgataatgaaaacgaataacttgtaaaagttaaataagaatattcaaaggcccataaatttgtatggcatgcatctgcacacattcacatagacagatctgatatactaatttcatactactacaacactgttattcggagagaccggtggtccaggttgtcagaacaagagggagcagcagctagcaatttcctcgttcccctgctcaaggcagcagcacactttgcatctttattggcttagggccacccacattggcgtcgcagtgccattattcagaaatcaggatcaagaacgttagaagaaatggaatgagtgacaaaaatccctgagcactctctcacgcagtgtcagaatgagagaccaatgtagggcctgtccataatttcatctcatacagtgtgttgccaattgtaacgcagaattgcagagccattcagctccatccaagtgttctttgctgggtccggcatttgaccccggatttaatactgacgcaatgcgaatcaaaactccaaaccatacggactacggaggagaaactgggcaccgcaaaccactgtgaattggtcatcttgaacagtgcctaggtgaatgtaactatgtaaggtccattgcacttgggaatttactcaagtgcgatcctttaagatcatatgaacttttgcgaaatttggttttttacttttctttagccagtggttggaggctcggagccaagcttttcagaagaagaattgaagcaagaaaggctccgtcagcacacagacgtacgatcagcttgatgcgggcaccaaggagacagacactagagagcagaattcataaggaaaaaggaaagctatatatgcaaggtatggtagccactcggctaaagctatgacaagagagaaacaatgcaccacattaaagtcatcgctgtagtagtatgactctctttatagcaacagattctaatctcgaacgtctctaatttcatctctcaaattcaatataaaatagcatggtggcccgcgtagattgcgcggctaacatcattatattttctctcatataatagcatatatgatttctcattatattattccaatatattaaaataacatcataattttaaattttgcaataactttacgaaactacaaatgtgtaatatttatattgtattttatatacgtgttagttattaattatttttaatatcaaattttagttatttgtaaattatatatattcctatatgaactctagactcgtcttttaatatttttcttttttttacttccgaattttctgtaaattgtatttctatattaactctaggctcttcttccaatattatttatttttatttctgaatttttattatttctaattgtatttctatgtgaactctaaacttatctttcaatattctttaattttttaatttcaaatttcagttacttctaaattgtttcctatattgactttaaactcttcttcccatgtttttcttaatttcgaattttagttatttgtaaattgtatttttatacggactcaaagctctacttttaattctattgtgtttattccgaattttagttagttttaaattcctatatggactctatactctacttctaatattctttatttttaattctgaatttctattatttcctaattttatttctatatggactctatactctacttctaatatttcttatttttaattccgaatttcagttatttcctaattgtatttctatatggactctagtctcctcttctaatattccttattttttaatcccgaattttaactatttctaaattgtatttctatatggactctagtctcctcttcaaatattccttactttttaatttcgaatttcagctatttctaaattgtatttctatatgggtcctgctttttctttttctccgattaatgcgagaatttctaggccatgagaacgaacgtggaggctcctttttctattcctttaataatataatagataattataaaaaatatatgaaaaattgacggtgtagaccagagttccatctattactctatcgaaaatcaaatttaaactcgatctatacattaagaacaaaagtaaattcaagtgtaaatagtacaaatactgttcatttgttagatttgtttttttatttctccatgtataagtagagtttagactaaatatttattggatagtgcgctattttttaaagattttcttataacagtttaagtaatgtgtttgaataaacgagatggcatccccgagtgattgaaagagtttcctctctcttcagagtgtgtgcggttgagtggctgtgtataaattcaggcaagtatggttgctccctctgtggtggcctggcctcacaaagtcccagccagtttgcagcttattagagagatcaaagtggaagctatcaagcaagaaaggaaacgcctacacctactcctggcccctgccccccaaaacttctcatagcttcaaatcaactttttctagctagcccttcagcttcaaatcaagcggcagcttcatcacatacacagtgatctgtggatagctaatgagagcaagcatctagagtatcttgttcttgattccttggccgtctataagcttgtgtgtgcagcatcagctagcaacagaagcagcttcagctcagctgcaatggaggagcagctgaacccactggctgtgacacagctactgcagcacacgctgcgcggcctctgcacccaaggcgactcccagtgggtgtacgccgtcttctggcgaatcctcccaagaaactaccctcctccaaagtgagtcaactaatcccagcttagctgaatactcacttgatgacactgattagtttgacagtaaaagaattagcagtagcattttgctccatatttagtattgatgctagttgctgtttttttttcctcaatatggtcagatgggatcttcagggtggtgtttatgacaggagtagaggaaacaggaggaactggttggtgcaggatcttctttccttatgcatttgtatttgtttgttgattaattcgtgtttgtgattcatcttgggggtttacaaaactcgcctaggatcctggcatgggaggatggattctgcaactttgcagcctctgcctgtgaccaagaggacacaccagctgctgccgggtacactgactatgcagcagctgggcatgaggtgaagggcctccagcctgagctcttcttcaagatgtcccatgacatctacaactatggggaagggtatgtggtagtactaattaattagcagtttggcttgaaacatcattaattaattagtgtcatagtattggccgtctttcttaattagtaatctatgttctttgggaaaacctacgctaatcactttagtcagcacgtgaagcacgatctcatgatgcgatgatccatcttgaaggttggttgggaaagttgcagctgaccatggccacaagtgggtgtcccaggaggccaatgagcacgagatcaacctggttacctcatggaacaaccctgccgattctgtaagctgcagcatcttctcacctatctaatcagttcggttaaaactcctaaattgatgcttgcaataacaacaattaacatgtttttgttccgtataatttctgctgattgcagcatccaaggacatgggaagctcagttccagtccggtatcaaggtacacgtacgcctcgtacctaccaagaaagagtttgtgaatgccaaagctgatgatctttttactctcttttttggcagaccattgctctgatcgccgtcagagaaggcgttgtacagttaggctccatgaagaaggtacgcccgttctctgctctgttcttcagtcctcttcacccactctactgtgtgcagcagttgccagggtttactctatcggttcaggggtttttatcgggggtcaccgaaatcccaaaatttcaaaaatttcggtccgaaatttctgaaattttgaacaaaatttagttgaatttgtaaaaatattatccaaattcatgaataaattaaaaaattcaaaaatttcggccaaattaatatcgtatcagggtcaccgaaatgaccgaaatttcgattcgaaattttcaaccctggcagttgcactgtgggtgacttggtgtcactgatcatgtcaagctcgctcactggcttcgcgtagctgcatgcatgcacgacaaataagggggcaatgtatgcctatagctaagggtataagcagttaaccgtaaacttatttatagatcaaaataaattatttattttaacctgtaagtaggttacgggttaactatttacacccttacgtacagctcgccgccgtgttggtgtcggcatggccgtgctgatcgattggtgcgtcgcgttgcgttgcgtccatggctgcaggtggcggaggacctgagctacgtggtggcgctgcggcggaagttcgggtacctggagagcatcccgggcgtgctgctgccgcacccgtcgtcggccgcgttccccggcgccggcggcctgcaggacgcggcctgggcgccgtcgccgacgatggacctctacgacccctactacggcgcccatgccgcggcggcgcagatgcaccacatcgtgccgtcgatgagcagcctggaggcgctcctctcgaagctgccgtcggtcggccccacggcggcgcccggcgccattcgcggcgccattggcggcggctctgtggccaaggaggagctggacgacgccatggacgcggcgggcaacggcggcggcgagagcaccagcgccgccacgacgccgctggtgccgtactacgtagacgtggctaaacccgacgaggggttttagtgttttagcctctctctctgcacgtctccgtctcgaggctgtgcgcgcacggttgttgtaacatcttttcttttttttcttctagtgtcgcattgtgatgattattctatattaacccaatcatgtgtgcggctgcgtgctttgaactagttggaggtgtcgtactgcaacgtacatacgatatcctgtacgtcagattctgtcgatcaatcacactgtactgcattcttaccagcaagtttgatttttgcgtaatatcggaaattttagagtaaattttaggaaactgtaaacaaaactatcaatttgctacaacattagcgacatatttcagattgctgcaacaatagcgtggaaaattattacaaaactaaaccttttacgttatgtgctgctacagtacatataggtaacaactatagcatcatatagcgtaaaagttgtagttttatgataattttctatgctattgttgcagcaaactgaaacatgtcattaatgttacagcaaactgatagttttgtcactaaagttgtagttttttgaaatttactcaaaattttaagattagacacatatattaaattggttaatagaattaaatagaaaaagattgtgattgattggaaaaaagaagatagatacataatttgaacagtagaaggtgttttgttttggttgagaagataatgtaggtgaaaaaattattatattttagaataaatttaagaaactataatgtgttatattttggtttatggaagtacaatttaaacgaacgtgtataaattcgtttgcctccactttttaattaaacatcagttacataattaaaataatttttaaaatgaaaaaaaaatgatactccctatcatctcgcccatagtggaacatttccaattcatatgattttctttagaaaatcctataaaacctctgccagagccttaaacttataaagtagttattaccaactgattttacaatctttttgagatattagcggtgccatattgatagcgtaaagtttgatacattttcctcacacaacatagggtgccaactttttaatgttctaagggttcatagttcaagtgttcaccattatggaccgatcgagaattatgggtttcatgactcatcgtgataataaccctttcgttcaatcatatcctaggatgacaattggccaagtttgtaatgcaactgggcaagagacaagttcattgaaagaattttaacggcaacattgccctgatgatgcgaacattgcggattggttcacgtctctgatgtccagatcaattcaatttgcctccaaagccaatgcaccaaagcaactagaccagggctacccatcatgacgaaaacccagctgctgcaagacagttgctcgatcatgcatgtcacatcagccaaacctacgaaggcaattaacctctggaaaatgatataaaaatattctttttataaagagaagagtaatgctataagactaccacatccatcaatcattaagtttagtgttttaccatgcgagaccaggtaagcagcatcacctgtacatgaattagccggatgtaagttgtgcatatgtatcgggtgcatagcaatttttttataagctttttacaaatgctaatgtgttgtattatagttgaatcttgatttttttaaaacttttatagtatacttttttatcagtaaggagtttataagaattcttttaaagaacttaaaacactgttgaacttattaattaatacttccttcgttttacaatgtaagtcccacattcatattaatgataatgaatctagacatatatatttatctagattcattaacatcaatatgaatgtgaaaaatgctagaatgaaccgtgcggatttcactgtttcactgaaccacaccagtttcagagacacagtgagttgcagagttggaatcgattcaatgtcactctcttacgctggctgccagtatacgatgcctccggccgcccacggctagcttcgagccttcgatgtcgtgtgtttcaccatgtttgtccatgcgacgctcgcatgcatgtatgcatgatgcatccatgcacgtacggccgatgtcatgtgagttgtaacttgtaaaggggaggagtgtgtccgtttcactcatcggcggatgcagcggcgctgtcgacggatcgatcgatcgatgcattgggaaacgtgaaaggttccgtgatcgatccagtccttcacatcaatcgatcgccatcgttgagtttgactcctcctcatatcaaaataattataagtattaaatatagattaatgataaaacccattctataattctggactaattcgcgagacgaatctaattataagtataattagggggtgttttgataggactaaaacttgttagtccctattacatcggatgtttggacactaattataagtattaaacgtagattaatgacaaaactcattccataaataaccctggactaattcatgagacgaatttattgaacctaattaatccatgattagcctatgtgatgctagaataaacattctctaattatagaataattaggcttaaaaaatttatctcgcgaattagctctcatttatgtaattagtttttgtaagtagtctatgttcaaacattcgatgctatatagactaatgtttaggccatgtatccaaacaccaccacacacattacgtgctgtgatccgtcatccattgtgcactgctaattcgttcataattactcgcaatggcgtccacgacctgtgtgtacagttcgcccctactacatactccatatacatatatatcactgtccccatacacgatcagtatggtcatctccgtatatttcgctgaccgtggctgcaacgatgcgtactacgatatgatggacgatacgggggggccggggtccctgtggatggatggacacatgtttgtatcctttgaccgcacggtgcgtgcacaggatcagcgagagctcgccgtgcccacgccgcgagggcacgctgcatatgcacgcagatgaccgggttcgttcgcgtgttagcgtcgtgagccgtcaactcgttcgtcgtccgagttcagtgtacagggttttcgccgaaagaaacaacctgggcaatgatttgttgggcgtgtgtggaagatgaagaaatctgcaggtggaacgtaacatggccgggtacgtacgtggtactgtgcggcgtggcccggtcttgactgattgttgggcaaaggaagaagctgcggaaattaagtggttgggcagcatatgttggttgtcgtggaactgttcggtccatcggctctccatggatcgtgcatgatctcgtacgggtctgtgaaatgtgcatgcagccgcggcactggcatttctagtctctattcgatgcactggatcgaatgtaatgtgagactgtgcatccttctagcttctcatgtttaatgtgattgaactctgctgtcttgcatagccaactcgccagcgaggtgatttgtactggttcagagttcagactcttctgccttggcgccttgccatcgtctcgtctaacatgtcagattacatatttcctccctgctgtttgcaactcttcacggcgccggcgccgcgaggaggcggaagccaacagcacaatgaaaacgttcgtccaccgacacctggccagaaagccagccagccagggaagcacacgcggatcagtcgacgccacagccaagggcgaatctagagcacggaggacccgagtgcacacttcatttatgcatgtaatagaaatgtaaatgtaatgtatacaatgacaaaaaatgcttaccaaaataaaaaatctggtagtacatgtctacatagcaatgggcaaaatatataattaagctgagtccttaatgagacgataataacctgtaaaaaagtgctaattagatgatttaatatttgaaattaggccttcatgggctgcgtgcagtagctgaaggtggtacacatatttttttctagggagtgcataaaagatggagattagatgctaataactaaaaactaaatttttccctggtgcctgtgcactcggcaagctaaacgtggcgttgcccctggccacagcgcgcggcggcacggcgcaccgtgcatctctacggaagggactagggagcatgcagtgggcgaggagtagtacttcatccgtatcgtcccgtgactggacccagcactccagcatgagaggcggatatgcctcgtcgagtggcggatccagaaaatcgattcgttggtatcataacgtgtctatcggtatcatagtatgctaattatacttagatcattttgttataacatatagataagcagttttgttataggttttgctaaaagtcgtcggtgtcgcctgacactagccctagtaatgtagatccgcccatggcctcgtcttgcaatttgccaactttttgtgtgtgttttttttaataatgcataaatttccacgggtgaatatactatccatatataagggcatccacaggggtattcaactatttgccacttttaagatgtagcaattaaaaatttatcactcatagtttgggtccttaagtgtctaagacatgtgggtccaatgacaaatacttaattagcacttgtaagagtgccaaatagtttaatatgttgcatccataatatagtgaaaaggtgggtatatagggattaaagtattcttgccaccagataagatatattgtgaaagtagtaaataattactaatccatccgtctcaaaatataagtatttttagatcctgacacagtctctaaaatgctactttgaccaacaatatctataaaagtaagatgttttaaataaaaagagttgtatattgtgatagtttttttaataataaatcaaataacaccaattttgcatgattgatctttttttattattttattgctattaatgatcaaagttaaacatgtttgacttgtcacttcgtggtgtgttctacctattttttaattgtggcatggctcatgttttgggttttttatgtgggtccactctacatatatatacatttatgtgggtccttattatccactctacatatatgtgggtccttattatccactctacatttatgtgggtccttattatccactctacatatatatacattgtgaatttgtgatttattttcaatctactattgtcttctgacatggacttatcttactaccaacttttgtaacaaacattaggaatgccctaataacatgcacatgtatgatcatgtgaatctcagtactttttttcaaggaccataatctttctgctaaaagaaattgacaactttagtccctacaaactgaaacaagagggaattcatttcaatcgccgatttaaaacagtgtccgagatgtatctgttgaaccacagccactagtcgctgctgccttatattacgagaaactggtcacagatgacagatgatagtaggtaggttcaactccatgtcaataatctactattactgatttcatttataaaataattggctttttaatcaaaactcacaaggtaattattttcttttgaataaactaagaccaagacaacatcattaatatagctttaacaattactccatctattcccaaataaataaagcacgagatgtgatacatcctttattcccaaataaataaagcacgagatgtgatacatcctttagtactagatttgtttattctataacaaagaacaaagggagtaacactaagggaaaaaaaatcaaaaatgagatacatagggttaagagggatttttttttcaaaaaaaaaaaatcttttgcagactcatagcatttgctggttaatttctagaggagtgaatttagagtgctcgcttaatgtctcgtgttgggtatctacacactattagttcttctatcaatattgaaattatcatgttttgaattccattgttgatcagcagattgagccaatttgctcctacattggcagcattttagtgggattggttacgcatttactactgtaatgcaagttaaattccactaagcaattatacaggaacatggtaacccaggacacggtccaaggcaaaacagcgagcccaaagattacccatactgaaagaagtaactgaaaacaaataaactttttttcaaaaggaactaggataggctaaggcagcgaagatgaagtgcgagccaactgatggaaatgttacccattaccatgagataaattaaccaacttaattcatctcaacaagagttgtacaaagtgtctacattcaacgttgagtgatcagccatagcttaacaaaagacaacaaagtgaaacaacggtgcatcacgagcgggtcagttcacaggaactccagaggttcacttctatttgcctccgcagccggccatgccgagggacaccgaggcagcatccccaccaccaagtaacatcaaaaggcttcgcaacaaagccgttggatgcttgcagcttcacaggctcgagtgagccaattgatcaactaatcatcgcaagtgattctctttctcgttggcgttctttctcggccgagcaggagatctcgcacgaacggcagtgacgttctccttgttgctgctcatggattcgtcaggcttcgcggcgttgcggtccgtgagagggatgctgtccacagctggtgaggacattgctcggggcagcctgaggggtatgtctctgttccgtggaaccggctcggtgttctgcggcgccgtgggtgggagaggtggcgctgaagggacgagctgaacggtagacttgcgccaattcttcctttgctttggttttgccccagtttgtttcacctgaaaggagtgtgaagcaatatgaggcatttctgtgacatggaaaactgcacgataatgatgatgattaattatatccattgaaagatatgcaaatttaatcaacaagacaatgtggcctggagtgaagcatagcacataccacaccatttccaatatcagccagtggttttcttgattttgtctcttgagcttccttctctgacatagaattctcaagaagcatgacgccctccttcacaatttcctgaacttttgcatcatccacatcatctgaagaagatacttcaaccaccccaccaccttccttttcttccttcatatccaccctattagaacacctggaggtaatacatccacaatcacccccacaatgtgaacctgaagctctacattcgcatttttgggtcttgcaggatgagtatttcgagcatgagcagcactgtggagcaaggtccagtgaagtagacttttcttgactggccatttctgattttgcacttttttgtgtagtaccactacccgggttaggattcagatggctggacactgtttgccgacgtcttctgaccttcttcgaacattcccaatctgcatcagatgctccgtagtctgcatcagatgcttcccaatctgcatcagatccttccgatttctcagaatctgatatatccatgtcatcagaccacaagaagctgttcttactataatgtaaactatgggaagctcgaatgctctacatgcaaaagggaagatgtcagacacactttacaaggattatatggatctagtgcattttggatatcaccacatataatctagatgaaccaagatacaaaaaaaatacctttcgcatagcataatgttgaccatcttcagaaccaacagtaccctttctggaagtgccaacaggattttttgcttcacttatagcagtaaataactgtggattgaaaaagtataagcacacacacgattcaatcaaacatatactggtgaaatgcatcatgaaaattgctataatgtaatcagatttgccagactgcaaaattaacagaatatttaccagcatattttggttattcaaatccttcacttgagtttctaattgtctgattctaccattaagtgcaaccaccttttccttcaggtcacaaatgaggtgttctttctctttacacatcacctctttgtcaagttgttgacatctataggcaacatgcatcaaataaaaacagcatcaataaattagggttgtttattcgtattaaaagaaacaccaaagaaaatgttaagaggatttaaacatttcagaaagcaaagtatgacataccttgaagatgatgccaactgaaaaaggtaattcattgtgttcttcgcatcaggaagggaccttacatggttccatctgcccttaccattgaatgcacgctctcgctcctccgcttcagacagttgagaagccatagacaccattgcactagaggatgatgacagcatgttttctagcgctgatatcctagaacttctagcactaggagacatagcctgaggacactctttcagctttgctatttccttggagattgctgctctcctgttaaagaaaaacaaaatgatattagaggagaataatgagaaacaatttctcaaccagaatgaaagttaggaacaattatttgaactgcactgatcagaatgatgtattgtggattggctcaaagcaaaaggtttttttttttggaaacaaaagaagtttggttaaaatttagatgaaaagatcaagacagttttctaggaatatgcaaaagtttgtgtaccattgcattattaagagaaaagaagtccaactggatgtgcgaagaagaccaaccaccctaacttcaatggcagcttaagctcaccccccccaaaaaaaaaaaaaaagaatatgcaaaagtttgtgtgccattgcattattaagagaaaagaagtccaactggatgtgcgaagaagaccaaccaccctaacttcaatggcagcttaagctcacccccccccccccaaaaaaaaaaaaaaaacatcatgtgacctaactcaggctgtatccataccgtcgagttctaggggctaccttttgtaattaaggtactgaaacccatttatttgatacatgaatgtgttatacctaaaaaaaataaatgtaccctgtggaagtccatccatcatgaagacaaagacttactcttgcatttgtcgctcgtagtgcgaacgcaattcgtatgcccttacagtcacttcaagttcatcatcaatggcccgcattaaagcctaatgacatatcaagagaatatttcagatgaaatgcaatgggaaagcattagtttctatatatgcaaacaaaaaataatcaaagtttcagtgataatacctgaatcccagaaccgcttgcacttcctgaaaatttaaaaaataaataaattttcaaccatgaggcagtatttacgaattacttgctcacaagtgcacagtaatctgaatgggaaataaaattagtcgatgttttcagcttattaccatatgtgtcacgggtggacttttttgcttcaagcgactccttcagtcttttcgtagccattgctgcttcttcagttttccgctgtaaaacctatgttttgaagaagaatggtattactttcatgttacctagaaagtctagaaagggagatgactgagaaatccaaccattttctgcctctgatttagggccaggagtttatgcatctcatattcatttcttctcccttccttcttgagctagttaacagaaatatcacgtgatcaccccagtcttttgaaaattttggatttcccaagaattcaaactgcaagcagaaagagcaaatacctgaagaacttccttttcccgagcagccttccaagatctaaattgctcagattcttgcttaatcttttgttgaagttgaacctaacataacacatattgaggatatgtcagaatataaagctaaactatgtttgggtctctaggaaactgtgaggagaaaaccttttgagattttatacgatgaatatcttcttgcaagcgcttagcagcctcatcacttctctgtttctgtcgtattagctgctgttgagcttcctgctttttttttagctcagagacctgcaaaacaatggcaatcagtatctgaggaagagaaaaggcagttatagtgtgtgcgcacctgagattcaagtgtattcagcttctgaaggtagttttctttcagtttttgtgcactctcatcagtagaagaagtaatattggttaatgcatgacgaagttcctcaatttctttctgaaaacaaaaaaaagggttactaatctttaaagatagaagttaagaaattgtccattttaatcaaataaacctgaagagccttcttttcttgctccatctcatttaacttcttctcgtaatgttgcttgagaacagaggtgtcactttttgcaaattctttcatctccgccttttggaattgaaaatggaatataattacactccccgtgaatcaaacaatagaataacgtaaaaaaatttcacatagatgtgatataaagtcagttgttcgaaaaaaaaaaggtgtacagatggcatggatgagtgagataaatcaaaacatatacatatacatataacttaaaagctagtgttagaataatcaaattcatgtaaaaagtgtttagaccaagtcaaattgttgtagccttgtctatgaacagcaacacttgttaagaaggggaaattgtacctccttttgctgaagtcttttatctagttcctggagttccttatcaagtttgtcttgcatggatgaatggtctctttccttttcttcatcggcttcacctgcaggtactggagttattctaaagtttacggcacctatattagatttagaatgttcaaattttaattttagagttttccgggcagtaaccagttagtgatccaatttcccgttactgtatttcactaggggccaataactccatacaaaccagtacttgaaaccctagtccttggtgcgaaaaattctacagttctttggaactgttaatttcagtaagttaattagtggtatattattctatactgatgtacacaggaacacaccacaggcaagttcactgctaatatcatagagcgcagactcaaaagtgactgtgtgatgcacaaaagccctgctttcaattcaatgttctacgcattaacaccaatctcgtgtgaacaagtgtaaagctaaaacaacataaagtggtcatgttaaaagaagaatcaacatgtcatacagataatcctagatatagtgctagaagtcactagattgtaaaatgtgacttagaacaagctacttattcaaaaaagtataacaaccgcattttatgaaagtaattctgacttccttttacttacttgaagcatcaggtgttcctacttcacaacctgaacccaagtcatcgagaagcaaatccttgtccatggcaaaccgatcatgtaaatcatttttgcaggtactagagaacttttgccttgtcagttcactctccaactgctgaattttcaaaatatatctcttcatgacctccacatcctgctcagaacaaaagcatatgtaaaaatttgttcaattacgttgtttaagaaatattcccacaaatctgaagagcaggagatgggtggacatacctggtcagtatcagtattctcaatgtcatcccatgatttcccattgcgtgctgattcaatcttcaacatcaactggtccttttcaagctgtaacatattattgttagcagagttattcacgcctactttctttagacagtttgcatgttagtttactagctacattctgttctagagatgttacagataattttcatgtgtttcatactaattgcaatagttaccagagaaacatattacatgatctagaatacacctatatacagcatcacctagcaatgtgaactcatatgtagtactacaaaataatgttatgcacaagtatattggaacttcacttagataaaccagggtacaggaatcaatcataaatacctgggcggcaagtgcactttgtgccaactgttcatatgacaattccctttccttaagctcatggttaagctctgagttttttagctcaagtagagacactttttgttgcagcagctgaaagacgcataaacaaaattagacaataaatcgataaattcaaccagaccttgcagatctgcaaaaccaacctgcagttcttctagagcagcactcccactgcgggagaacaggagctcagtctgcaactgctccaactgactccttaatttttgcatctctgctgtaactgggtcacggtttatctacacataggacacagtgggaaaattatatcaactgaaaaaatactgtgagcatacctttaaggagaatgaccataccacagctttattttgaatgttccgtgcacgattggcatacttgagtgtgtttatggtttcttctgcatttgaatcggcaggactaatgcaagctacaggtaaataaacaacatagaagatggattttagtaaagatactaccaatacaacatttactatcaagacatatatacctaccaatcatagcagttttactgtttcctccaagcgaatcctgcaaaaaaaattgaatatagtaatgagcatgatgcaaacgtgccactgtgacagagcaatcaggtccaaagtaatcgcatatttttatgtccagtaattcgtggatttgagtatttaatatgcttgtgacataactaggatccatacctgcagaagacgtgttaatttactgtcccgatatgggacaaatgctccttcttttctcttcttttcatcgcctaatgcactaatgacattgccaagggctagaaggcctctatttatgtgtattcctgcagccacaaaatatatagaacactgttcagatcagatgcccaattatattctcaacttaataggtaaatccgtccttaccttctttaagccgtaatccgtcagctcctgttcgtttagccctttcagaacccgcaaggtcaactagatgaaactttgaggacaaaatatcatagtcatcgttagataacttgtcagaggcactcgaggtcttcttttgatccattgaaattgtaaagatagcatgagaccggctacaaagaaaaattgtcattccaacagaaagaattgtcagacctaatggcaaattttcaaatagtaaatggacttgtaaaaaacacctacttgtctcatactaccattgctaaccaattatattattggctccaataatgtcaagaagtacaataaagttatacccaatcctttttgttgataacaaaaacacatacttttgggcatctatacgtcgatgcaaatatatcatgcaaaactatacctattatgcagaaatacaaaatgcaaaaccagaacatgcatgcagcttaacgagtgcaagtttcattatgcatgaagtgctaatattgtatttataaccttttaaatggtaaaaacatggcacaagaaccccagaagcaatgaaggaaaaataatctctgcataaagaaattgcataaactaatctgtaaatttaaataagcatactatcattcctttgtaacttaccttgactgactattcatgtttgtacttcctgttgcacgcgaggaagaaccacgtgccaaaaatgaggccatttcttcctttgtcttcacctcagcctctgtcacaccagcaagtgtaatgccgccattaccagtctctctaatctgaattggcactctggcaggtgcagttgctttggctacagaccctgaatcaagtctgagggcagcatgacttgcatctagcaaatcaaagacttcctccttgaagatctggagtgcacacaaaagatctcaaaaatgttatcacgaatgaaactgatggcagttggaactggcaaaacaacaatagatgccaccatgtatgatacctcaatgaaggacaccctaattaaaaactctgtgccatccttcaatgcatcggcctttttgaatattgtctccataacttgaggaattattcctccacaattagcttcaccagtataattagtacccattgtatatgtcttgccggagccagtctaattttgttagaggaaaaatacaagtcacaaaacaattatctaaaaaaacatttctagcatcattattagtgccaccatactaaagaatttgcacctgcccataagctaggactgtagcgttgtatccacggaataatgaatcaatgagaggatgcacacattgctcaaatattaacgaggaaggagagcctgtgctgccgaatacatggtcatacgtgaagacatgtgggccaatttggacctacaatagcacagaaggcatcgtcagaccagttgggccttgaagcaatctttaacaatacaaaagtccaggtaaaattacaatattcttaactagcattcatattaggatttagacatctggataggagttgcgagtggtaaaactataatattaaagatattattcaaactagctcagaatcagcaaagcgcaagcatagatctttcactatccatcccagcaaagaaaccgttggcccttgccaagccactctacccaaattatcatcgaattagctaaaaaccccaaggcctgtcacatcattcgccaatttatactagcatatatgcacccaattcaaaatcccagaagcatcgcgtcccccaggccactcgatcctacccaaccagacaaactagtccccaaacagatcgatacctgcggctcgccgggcgtgacggtgacgcagtcggtgcagccgaggaggagctccggcgtgatgagcggtcggatgttgacgaccaccttcacgctgtccttctgctgcgctgcctcggaaccctccatcggaaccctaaccacgaatcccccaaaacgaatcagaccaacagctcacggaaaaataccctagaaatctaaaattagcccccaaaaaactcacctcggtcaggccgatctggcggatcggcgaatctcccggcacgacgagcaatgcctctggctccggggatctggatggcggcgtcgcggggggcttcgttagggttagggcttgatcgccctcctcgagagagagattggcgtggagagggagagagagagatttgcgaaatgacgaatgggtgagagggagaagcgcccgcccggcgaaattgaaaaaaatagggcacacgcccgaaatgttttagcctatcgtctgcatagaccgtgtctatagacccgtgggtgagtggcgctaagccccgtaggcattctctaccgcgtgtggcgtatagacccggtccaggccatgcttaacatcacgtgacaaggaacggagcgtctgaggcctccgtggacccggtgcatggggcgtcccgcatctatcaccgttggttgcttggcttgagtgcctaggatgcgtgtggcctatggacgtggcctatgcgccgcaggaaccttcggctctctggatgcggtttcgaattcaaaaacgtagggaaatgacgttcttgcaccccgtgtgaacaggctacgcttccatgtggggccgttcgaacgttggcacccgttttggatagcatttgacgcccaacgttctacttgtagtagtataatcgtagagtaaacggcagctgatacatctatacgggctattgtgtttttaaattattgaatcaagggtaaagatttgaaatgatgattggcagtgttcggttgacattgttgcggctatcctacagctataaaaggcacggagcactattgtcaggcttgttgttatagctagggtagccgaacaacgccaatgttattttcctacaaagtgcggacaataaaagtataaaaacaacagatcgagcactccgttaattagaatttttttgaagagaacacagcaggggagggccccgctgttagaataattttattaataaaaataaaatatgaaattacaaagagattacagcagacggatccagtccctgactacatcttgatcttgtgcattgagcctaaacagcaaaagaagcaaatctcccttaagaagttgcttccaagaagagaacaaaggcaatttatcctaaaaaaataaacccattcctttgcttccaaatattccaagcacctaagagaaatttctccataaaacattttcctagataaagagctttagccaacagaagcatgctctccaaattgagagaagaatcccatgagatgccaatatgattccagcaggctaccgaaaaaggacagcaaaagaagaggtgcacaagagtttcaatacacctctgttgacaaagcacacaaaagagatcacaattgggaggggcacagtgcttatgatcaagcataaatttggtatttaatttttccatcagaagcaaccaaccaaaaaccttaacctttgagaaaccttactcttccataaccagaggaaatgcctcggaggctgcagtgatctaaaattgagggcatagaatttttgggaggtatacttaaggccaccccaaatgtaagaccaaacatcattctcatgagacaagttgatgttgctgagaaactcggtcagttccaaatattcattataagcctgctgtgagagaggaagaatcaaattatctgacatatcagtcgagagatatttatgtacagaaacatttgtcatttgcaaaagaatacagcctaggcattagaaaggttaatggtggattttcagaccaaacatcctcccaaaaacaacaagaataaccattacccatggaacatttggcaatacctctgaataaatccatcaacttacaaatgtctctccaccaaaaagaaccctttgaggttgaaaaatgaggcacaacctgagtagtaagaattccatatgaggtcaacccaaggcacctttctcctattataaaatttatcaagaaactttaggagtaaagcctgattctggattgaaaggttaatgactccaagacctcctttcatctttggtttgcatactttatcccaggcagccaacgactttctattagagtttacctctgaacctctccacaagcaatgttttcttgctctatcaatattgtcaattacagtcttgggcaacaaaagagtacacatataatatgtaggcagagaggaaaaaactgtgttaaccaaggtaagtctatcaccataagagaggaaagcagcatttgccgacaaccttctttcaactctatcaaccaaaggggcaaaatcaattaccctcggcttagtggttcccaaaggtagcccaagataagtaaaaggaagagaaccaaccttataaccaaacactccagccagcaaatcagccttttcatcagatatgtttataggaattaagcaggatttatggtaattaactttcaaaccagtgccttgagcaaaatattggagcaaagctttcaaagtaaagagttctcttccactagccttagcataaaggagagtatcatctgcatattgaaccatagggaaattctgatcctgatttgagggaaagggcttagagagcaaccccaaagagaaagctctattgagaatagtctgcaagagatcagcccctaaaacaaaaagaagaggggaaagtggatcaccttgtctaaccccccccccccttttacaatggaaattttttccaggtactccattaagaagaaccgatgaagaagcagaggagaaaatcttctgaatccaattcaaccacttatcagtgaaccccatcaccttcatgacttgcaaaatggcctcatgctcaatggtatcaaaagccttctcaaagtctaatttcaacaaaactatctctcttttggaatgatgacattgatggagaaattcaaagttccaagcaagacaatcttgtatggtccgccttctaagaaaaccatactagttctgatgaatgactgaaaggattaccttttgtaatctatctgccaacaactttgtcaaaaactttagagagatactcatgagagatataggtctgtaatcatttatggtttcaggggtcaactttttggggaccaaagtgataaaagagtggttcaaggagtttaaatcaagtgacccagaatgaaaatcttgacaaagattataataatcatgacaaattatgggccaacatttcttcataaaaagtccattgaaaccatcaggcccaggagctctatcagttggaagattcttaacaagattatctatctcggatttgggaaaaggagcctcaagaacttccagaccattttgaggggtaattaaagaatagagatcaaaaggcatagacacaaaatttgaaactcccattctacctttaaaagtatcccaagccacatgagctttaccctcatgatcaaagattatagtaccatcaacatctatcaaggaagcaatagaatttttcctgtaggactcagttgccatggcatgaaaaaatttcgtgttttctcccccaaattttgcccatctaatggtacatctcttttgccagtaaacttgcttatatcttaagtaagtaagcagcttagatctaataaaaactctgaaattccactccaacaaagaaagatatctgtattcctcaatactgtccagaaaagagataacattattacagttagagataagcttctggagtctggaaagattcttactccatttttttagtccctttcttaaagctttaagctttgaagaaatatttttagcagaatcatgggaggaaccatggttatcccagatagactgaaccaagtcgaaaaaaccttcatgttcaatccaaaaattctcaaatctgaacacattagctctaggaatattagttccaatttggaccacacaaggtgtatgatcagaaatggatctagccaaaggtttcaccaaagtgtggggaaaagacagtgtccagctgggggaagtgaaaaaccagtctgattgctctagtaaaggctgttgctgcatattgctcaaagtaaaagctttgcccttaatagggagttcaaccaaacccagatcactaataacctcgttgaaaaggaaaatatcatttatatctgcacctgacttattcctgttgaagactgaccgatagaaattaaaatcccctaagagtaaccagagatcatcatccaaaatttggagatcatgaagccaggttaaaaaattgtctctctcaataccagcacaaggcccatagacagtaaccagggtccaagaaagattagagtgagtagaagtaaaagtaagttggataccaaaactctcaataacaatgtttgaggctgtaaaaatagagctattccaacagatcaaaacacccccagaagctcccctagaaggtgaaaatgcaaatttatcaaaacgcttaggagcaagcttcctaatacaagaatgatcaaaactgctcctctttgtctcctgtaggcaaaaaataacacaaccactttcctcaaccttattccttatagcaagtcatttatcatcagaattaatgcctctaacattccagcataacacattccaattttttaaagaagggttcatttaaaacacagggataaaataaaacatccagactggatataatccaatcaataactgcaactgaaaagcccaaatatcatagagtaacatgggaaccataaggtctgacaaaagtaaaacatcacaggacactagctgataacagacaagtccaaagcagcctagctgcaacaaaaaacagcacaaacttctaatcattactaactgggctgataggcttggtgaccaatgctgaagaagaaccttacattgacaccacagaagacacctcctccagggaagcaccacatatgtccaatccaattctctgaattaaatcaacagaacaatcagcagggataacagtggacaaatcactagaattatcaatagaaatatcagaatggagatccacaaaaggaatcagttcattaggaaataccactccactagcatcagccaactgcttaagctttctgacatccttccctcttggcttaccaacccccatgtttggatcttcagctaactcttgcctaaacccatctctgatagctaatagtctaccacttctcctgacagaagaatccaccaatggggttaccattttcctctttcttttgcagggagaaacagggttcagcttcgtgataatccttgaattaggtgtaacagggcttggattaacatcaacaacatcagaaggcatatcaaaagggttatcaggaagtagagggttgtcagggggcaagacagccaaaggagttggctccagcaacagatgatgctcctgaaaatcgtccaaaacaggcagcagagcagaagaacaaaccacaactggcgggccccttggcagagagactaacccatttctaatcacagcagaaggaatcaaatttacagaccattgatgaacaaattgagtgaaagcagaagcaaggtcagaaaataaacccaaattcgtttgctcaatagtaactaactgccaattgtcattgttaacaacctggcccatgttatcaatagcctgatccaaattttctgcatcatcatggacctgccctacagcttggtcccaagggtgatcttcttccacatgcacatttgggccaaattgccaaatattgtcgtcatctgggccaccatcataaccactgtccccatcattgccgggattatgcccaactggaggcaggtcttcatctggcgggaacatgtctgcaaattctccttcaagaataaaaacagatatagtccaggattcaccagccccagccgtaggatcttgcaagacaatcttcttaggaactgaatcagcatccttatacattgctctaagcatgactctgcccttaatgggatcctcttcccaccaataatctaactgaccaaaggtggaagtagccagacatatatattgcatattaatataatccaaagggaagtcaagcagtaggaaccaacccttcctagtgaacagagaagcacgccaattagggccctgatcatggcgaacaaaacagacctggtgaatgccatcatagacaaaagacggagaataaaccaacaaatctcttatgacagcagaacccatcttaaacaacccaacagcagaaccatgtgggaaactgcgcctaacttgaaaatgctggacttgctcaagaaaattagtaataagaaccctatgatcatcccataactccaaaacatactgttcatgttgccgaggaggtcttgtagcagcagaaagatcgactctgggaagacgctgatcccctccttgatgcacaacttgccccgcacgaaggaaccgaaaagggtttggattagtattcgccattgaagcttgcagattggattgaggtgctgagtttgctagctggagagaggaagaaggagcgtcttttgtagaagaagggataacttttttaacccattgttttttagccataggcctaacagatttaatgctcgtaacaacctccttaccagcaggcttagcaatagtattagatttcacaagattagactttcccaatgaaacagacttttgggccttactgcacaaccttctaatatggcccaagttgaaacaaagattgcaccgaacagcagacttacaaaatcgagccaaatgacccggatccaagcaacggaaacaaatcaaatttgaattccgaggatgatccaaagaaaatggatccagctgcgtacctttctcgacattgttaacatcagctccggcgatcaccggagaagaagaagaagaaataaggggccacttcaaacggctgaaaactgaagacacaggcacatctttatgagaagaagaagccgcttttgcataagaagaatgtttcctctgaaccaaagtccattcagcatcctgctcattctgccaagaaaagaattcctttctccaatttggtctgccatctctctaaaggaagaaacgaatgcaaaagtccttacaagtataagacctaagagaataaatccagagaccaatagatttggagcaaaccaggaaagagaaacaccgatcaattagatgatgaacttgaaaaccactaggagaaccaccaatggccgcacgtaatgcaagagccactgaagaagtagtcaaacgaaagttggatcgcggaacatcaaccaccaaacgaaaaggagaagagctaaaggaagaagagaaatgcactggaagaccaaaacgatgagacacctcatcacggagagcatcctccggagagaagtcccaaccccctggaggcgccggtgtgaccatcgacactcatgggagatcgccattgaaattgccagagccctcccaaaatgcctttttttctctttctctttttctctctcttttttcattcccgttaattagaattatcactgtagcatattaatcggtaaattaactaatcatctccgtgaggcatgaaagatcaagtcatctaaccttgtattgggacgagttttggtgattaatgataacgattgttggaattaacctttactatgagtttgtgatggtaggttatgttttagcatcaagtgaaaaggttgatggctcatatgtaaggatcaagtaataggattatgtactgatgacaagacagatgatgcctcacatattgggaatcaatgagatgtttgatgagatcccataatgagttgatggacatgttgaaggagataaatatcatggttgaagataacaaaaatgaagatggtgtaagaagctacaagattgaggacccctttgaatggcggtactgaaaaaataggggaataggaaaaacactatactctgataggaaatgcaggtgtaaaacagaggattgcaaaacatacgaaaaacatgggaatggtcgtttgattggattgtaggaaaaatgcaggaaccggatgagagaaatagactcaaaagaaaaattccaacaggttagagctcttgctaagttcctccaagatctatatgcaatgagccattccataggaatttcatgtgatttgaaaagcttcaatcctttgagtcaaatggccacataggaaaaattcctataggattagaatcatatgaaattcctgcataaaattatttgatccaaagggcccctgaacacgcggagtataaaaaggctacctatgacaatacggtgaagcgcaagcgaagcatggctatgatagaccgtgtggtgatgaagggcaagcaagggacttggcgtcgacaaaccgaatccggtggagaaggacaagtgaagacattgtcgtacgggccgtaggagaccatttgaagctatggattatgtgtatcaatcagatcgtcgaaaatggactccggagtaagaagttacacattttttttcttggttgttgtcaggtggccatgagacttcgagtactcaagaaggcttccctgaggctttgggccgggacttggagactccgggcctatgcaagccaggcttccaagaggctctggaaataacatccatgcacccgagaaggtttcccgtgtgttagcagttagttcttggggtggaccgaaggctccaggccaaatccaggagacttcggggtatgcgcataaacatgagtaacgactattttctttagagctcgggtatttgaacccctccatccatggtttctaactttggacaagagtagaaccatccaaaaccaaagagccactctctgatatcatacctttgtggtagaactcttttgtgagtgtgatttgagaaggggatttgagaatataaggatttgggattgagagagaggttgagaatagaagttgagagctactttgagcatttaagttcatagcaagcaaatcttcgattgtgtttaatacttttggaggtcaaccctccttgacgacaaggcatcacccggtgagcttccaaccatgtggtgaaccacggaaagtttgtgaaggtttccctcatctcaacaaggaaagagttatgcttggtagagcaagtgccaccggtggattggggctcatcatctaaacaaacattggggtcatttaaagacttgctaatcctaagtggttgcttggaaacctagtcttccttgtgattgctagcttggtgaggaaagggatcaagtgagatctggctccctggagcctctcaacggagatgtaggattctcgaaggagaatccgaacttcgggaacaaatcgtttgtctcctcgcactcttttaccgtttttgtgctattgatagatatctcttttgcgagttacttgtgatagcttgtgtatcttgttttctactagtttacatccattattgctatattttctatgtactagttgtgttgatggcttgttcccctttgggggtattttcctgtcatctcggagactccaatctcctaggcctagagattccgagtgctactaatccgctgtaaaagagttttaaattttcaggaaatgcctattcactaccctatagacgatataaagattctttcaaggtggagtctagacacttggccatgttgtagtaagtatcatattttatggttttaagtagcacaaccacattttttaagtggttaaatatagttttccccttatatgattatttgcaattgcagaacaacataagcattataccattctagattatccgtggtacaattatacatagttaaaatttctggatgtcacgagaatttacatatgaaatatgtttatattctatcatacttctaagaatttactaactaaatgtccgtactttgctattggcacaaaaaaaaattgtttacagtaaattaaattgtactttttaatatatgttttgtatcctttcactatagggaatattgaccttatatgattttatacatgctatccattaagattcgattttttttaaaaaaaaacaaggagttcaagagataattttttttaaagaaaacagggtagacaggaacaaatttactgcaactagcactacttcattttaggaatatagatatattagaccactttaagagttgtttagtcacgtctaccattgttataactcgtgctgggcaaggatgtcaattttttttttgcccaataaattgttataatcatgattgtaacaaagttagaaagtaaatattaagaaactacaacaaatcatagctatagtaataaatcaaacacatgacgtggcgaactagatcttccaattccctcccaaatactcccgagtgattccaactattaaggccggacgtttgaccggatatcggaaggggttttcgaacacaaattaaaaaaataatttcataactcgactggaaaccacgagatgaatcttttgagcctaattaagccgtcattagcacttatggctaatcatggactaattaggttcaaaagattcgtctcatgatttctctcataactgtgcaattattttttatttttatctatatttaatgtttcatgcatatattcaaatattcgatgtgactttttgggaaaaaaaaattagtaactaaatagggcctaattctgcgcgactcgttacttcaatcctgatttctcccgtaccgttgctggagtcccagctgcaccagacaaaggactacagtgctgccgcctacttgttccaggacactcatctgcatggccatgtgccgcacagcgatgtcactggcgcctacacttgctacgaacaaatgccaagacttactcacatggcacgagcccaatctggtcccccctcctccgtgctaaacaacacagagcgaggccccatgcagaactgttgttgtgaactcgctgtccccctgtctgaatctctcgcagcgacgaactgcccgatagattcaaacaaaggtcagaattcttaattttgtcgacaggttggacgacaacgatagcggtccagtgctccattgatctgtccctgcactcgcactgcaaattttcgtccacgtttaaaatttgagcagaatctgggagtttgagagcagatcggatgaatttttctcgtcttttcgcgtggcgctgatgatttttttgagctgagattccgcgggtcaaagcggaaaccgaacgaggcggctacacctacacgggggctcgcgtcctcctttccacggagacgaaagctagcgcggccgaaagcgacgcgcacccaaagcccaacacaacacaacacggagccaaaagctaccgctcccgtccctctccttctcgcctcgcctggttctctcatcgcacaggaggaattcggaggtgaacccaaccggccacacaattcttgggtgctttgttccccatccgcttcgtccctccctcccttcccccgatctgctgatccggggctccacgcacgaaagtgcgcgcgcgcccggttttgggctctagtgctttggagtcgtccgcgttgcaccaaatttggccttttttaggtgggggagcttggatcctttcgtctgcggattttggttgctgggggtgggggggtttcttcttgcgatggttttgcgctgatagggggaggggatcttgggagttggaggaggattaacctcgtcaaaccctcctctcttcctcacccacgtctgattcgatgagttgtgggtgtctcctcccaatccgagattgccggagatggttgccgcagtagcagcttcgttgagatctctcgcacctctatccgcctatcgctctccttcccatggtatccatgccgtcgtcagggactcgtcggcgtacaccacccgacccccgccgccgccgccgacggcagatggcggtggtaatggagggaggattagccccgcggtgttgttcatcatagtgattcttgcggtcatcttcttcatctccggccttctccacctcctggtgaggctgctgatgaagaagcagcaccgccgtggtggagccgagaatgccgccccgtcgccgcacagccggcatgtcgggcgggacgccgcgatggaccggcagctccagcagctgttccacttgcacgattctgggctcgaccaggcgttcatcgacgcgctgccggtgtttgcctaccgcgacattgttggtggtgacaaggagccgtttgattgtgcagtgtgcttgtgtgagttcgacggtgaggacaggctcaggttgttgccggtgtgtggtcatgccttccatctgcattgtatagatacatggctgctgtccaattcgacgtgcccgctttgccgtggtacgctctatgtccccggattgaccatagagagcctgatgtttgattttgatgagaggttggaggagggccggctgtcggaagaatgcgaggatggattccaatcttccagacagaagaagcccatggatgaggaacaaacagtaactgagaagagagtttttcctgtaaggcttgggaagttcaagaatgtcgggaacactggtgtgggtggtgttgacaatggcaatgcagctggtatagtgagtagggaaccaggggagagtagcagtagcagcttggatacgaggaggtgcttctccatgggcacttaccaatatgttcttggggcttctgaacttcgagtggctctccagccaggtcgtaacaaaaatggcgtgggcagcaggttgaagggaagagctactggcataagctctgtcaatgctgaaattatggagggcaagaggatttgtgcaaagagtaaaggtgagagcttctccatgtcgaagatttggcagtggtctaatgtgaagggcaagctgccagctggttcagacaattgctcagaaacggcgagttttccgtggatgaagagagatgctactggagataagtcaaatatgtgacactgtctatagttctttcttttgtagtgctggttgttgaatttcttaactatagctattcttttggtctaatttcacatgtgtatgtttttcactagaatgaccatccccatcgaaagataatttttgacaggcttacatatttcaccctgcttgtgattgttcaggattaatgcagtttccactgtttcttgtatcagtatatgataataggtgttctagattactcagtttccttttattatgttcatcaaataggaacctgtgctgcgatgtaataaccagacaactgcacagattgcttgcatcatcaatttactaatagaacatattcccttagtgtcacctttggacattttggtcacatctgggatttaagtcgcaggagtacccatttaaggagaaacctctgattaacgacctgcaatttcctgggatgattgcataaagtctgagtaaacccatcagtcatttcattgtaacccccccaaaaaagaactcacatatcgcagtgatgtatgtgcttcagtgcctgtatcctactatcttctactccctcatacataaattttatttcaatctctagcataacaatataggcatgtgcatgataattcattatgggaaatttttaaaaagtagagcatatggaaggaaagattgtgagcatttttttcttcaaaacataggaaggcatatgtttctgaacaagaagggtctataacgacatcttgtttttgaatgataatatcattataaagtgcacttttggacgtcttatcataattgttggaggattgaagttctaacttgctttagctaccaatttggactgatggtaaataactatatagtttttacatcttgctggaagttaatttttttcttttactttgttgttcctgataagtaaccagaaagatgcatggagggcctttactttgcatgactcagggtgcattctcttagcaatgtactaaatatttaaatccaaataaataccttagagattaatgttcttacttttaaaagatgctttctggattttacaataccatcttcaagaatctcttaacttgcatggtagaaccatatttttttttctcttttggcatcgcagaaagcattccatgagctttcttcgtccatgataactttcttcatccatgataagtctgaaaccctttattcaaagccagataccttcgttttcaattaatatttccattataccaatggtaactatttgggatttgcagtattttacatgtcaataaattgcagtgatatctattgttcatcactctgaaaggtgtaacccttcattgttgcaaatgttggtcatgtccttcctccttttcttttcctttgacttccttgtccgttaaaaactcattattaccgctgctatttgtttgataatatcagacaagtagcaaccattgtcttttgtcaatcctgcttgtgcccaagcttttgcttatcgctcgaggtttccaactcaaaatagtttcagcttttggttattgcgccaggtggtgatgactaggtttttgagtgccattgatatttatcatgttattattatattacatgatactagctgttagagagctgttagtggtttacaatacttgtatagtgccatactaaattataaagtctctcatctttagcatatttaatcacagagcaatgaagaagtgccagccctcacacacccacaccacactgattaaacaatatgtgtactaccgacaagatttccagcgttttgcttttgagatctgagctactaaaatcattggtgtgcaaatgattagtgttcaaccagtaccaaatgctgcaggcaactactgcaatcatagcgagatgccgattcggcagaactattgtttacagcagttccagtagccgctgttttttttcttttgtatctcttgctagtagtacattgtttaccagctgttcagagaatggttccttggaaaagccagatttggtcaattcatgcaaatattccttcttgttgcaagttttagactctacttgtacatatcattgtacaaacattgggaccacgggcttcaggtctcagcaatcatgtcccaggtgaagtggggattctgctttcttttggaagcgcatttctttgattaaatattccatatgttactgactgtaacaaacaaattattgttcaaatgggcagatcatagcgtgaccaattgaacgcaacagaatcatgcatgtaacgtatgggtaaagacaaagataggatgaaataaggaaatgatatgcttctgctcacagttatcatactctatatcttcgatctttattttcatggattacgtgttgtttttgtaacaaatcaatatgatccattggatggttggagtagctgtgaatgtctgtaggctttacgagctggcactcttattagacatcaaatgatcaaagtggtagtactatatccaatccaccaaactgtttctggtatgatttgatgcaacgcaaataatcctatattgctcagcaagtacctacctgttcatagttagatatgactagtatcaatcacgattgcctgcctggaattcaataccatggtccgtgattatctgaaccgatagctcgtaattcccgtgattaacaaatagacaccttttaatcacgcagctgcagccgcagttaccagttaggaaggaatgtgagaggcaatgggaagctattctcagcaacaagtggacgtcacacggaaggatcgatgggaacaagaccgtagccattgctattgctagtctcaagttgcttgtaggaccagaagtccaacgtgcacggctctttcccaaggtctcctcacattcaattcttgggtcgcaatcactcgcagctggaacacggcatgatttcagattgcagagtttggattggaattaggtttgattattcctctttcttaccattcatgcaagtttccaggcaaaacagagggagtaaaatttgatcgatcaaaaaacttcaaacgtgtttgcttcaatcgggacaaaactgtggcacgacacgatcgacgaattcacggcgacaattcgatgacagagaacgaattaaacaaatctatgttcttttttgtacagtaacgaacgaactcaattgaaggaaacagaagatgagaggggaaccgaaccgaaacaacgatcgatctcgcttctcaccaaatcacgacattgcaacccgaagcaaatcgaggacaggacgccgtgttctcgtttgatccggtgaagtgattgtgggggagaggaacgagaggtcaagcccggccggcgccgtcgtggggcggcggcgggttgaagagcggcggggcgtcgcggccgccgaggtccatggacgacttggcggaggccggcggggcggcgaagcgggcggagaagtcgcggtagccggtgtagtcgccctcggggctggcgccgtggccctcgtcgaagttgagcgcgtagctgagcgcgtcgtagttgagcttccggccgtagttgtgcggccgcggcccgccgccgccgccgccgccgccgccgccgcggccgaaccgccggatgaaggtcttccaccgcggcccggccaccagctccgaccactcccgcaccttgagcaccgcgtccacggcgcgctgccaccagctctcctcctccgccccgccgacccgctggtgggacgacgccgacgagggccaggggaagcagcagcaccgccgcccgcgccgcgcgaagaaggccgcctccgcttcgtccatccccgacgcgccgccgccgccgccgaggtcggtgtccatcgaattcgtgagtttgggtgggtggatttgcgattttgcgtgcgctgtgtccgcgcgtgggttttattggggaggtggtggtttcggatcgggctggggagagtcaacggtaggcgcggcaggctgacgtgggccgggaaacgcgggcccgctttgtaggccgcccgcctctcgcaacgttcgctaaaactcggtctacgcttacttctccggttccattactccctaacacgccattaatcttattaaaatattttcatacaactttatccagtcataatattatggaatattcttttcgcacctcgcagtgaatacagtactgtcatttctgcgttatcagtctagatagaaaaatgcccttttgattcgtaggaaaaaaaatatgaattttaaagaattttaattttgtagaaaatttgttgtaaaagtacaatttttttagaggagaagtttttaaaagttaaaacaaatttcctatggatctttgaaattcctattgtcatttgaaattcttgaaaaattttctttgagttcatcactctcatccgaaattcatccgtttttttcctacggtctaatcaatggtttttctttgttttttcttgttttgcaattatttgattttcccttgcatcttaatcaaattttctgtgtatttttattcctacaatttaaaagtgtcttaacgtattttttacattggcgtaactattgatgacttgaatacgggatcacctgaacgacaggatcgggatggacagcgcgggcacagcacagatcgagggccacgaagctggagctagcaggcagctgcacagaacttgtgcaggtaggcgacctcttgcgccgaaacaggaagtacatgattggctatttgtgatctggtgttctggaataaacaaagaggacgagcatttccccacggcaatccgcaggtgttaaccgtgttatcgagaggattaagcaagcaggttgctccaggccgtggctcagtcaaaccaaaccaacaacataatagtgatccttcaaggcagtgtccaatatgtggggctcatggtttgttgcagctatcatccggaagcaaagtgcgtgtttttggataggaagtgttgggtacttggggttgggcggccagaggatcaggcatgtaacgcgtgcgcctcagcattttgaggcgcaagtcatggattagccgtcaaccttacgatttctgcaggttttcaagaactgtccgccattctgaagactgaaatcaattgaaaatttaaaaatcaaatttggataaagtatgctccgatgcttgaagtttggtaccgtgccattgctgatgtgaactctgccaagccagaaatgaaaatggtcggagacttgggcggtgatctcccgctgcgctgcaagttcacgggcgaaccgtatctacggttgctttcaaacaatctagggagatgcatttgacaggggagtggtaaggggtgtataattttaacctaaggtcccgtatttaattcataacatatttacaatttcttctaaaaaaatatttgcaatgatgtctcttcctccaaaatcatgtttttcaagcaatctagagtcagataaaaataaatctctaatattataaaaattaaagatgtttttgccggtactttggtacgtcatccgtgtagaatcggtttataagtttgttcgcttttagaaatacaaatccgtatttgactcgggttttaagttcgttcgcttttgtaaatacatgagtcatataagaaatctctttaaaaaaactcgcatgctaacttgagatgatcagacttctaattacatcacatggttttatatagaaatatatatatatccagacgaattctcatagtaaatttcaccttaattaaaccgtataacaataataagattaaaatagtctccacccgttgcaacgcacgggcaatttttctagtaaataaaaaaaggagagtttgagaccgtaaactcaacggcatccttgaaaataataaaaaaaagagtttgagatcacaaacccaacgacattcctgactcgtgaagagtacgtgactaacaagcatggaaaaataacataaccttttctcgaactttttttttaaagagtaaagtgcaaacgtgtgtctaaatttatgtggatatgtcatattggtatctaaacttttaaaatttatttttggatttcagatttatcgtgtgtgtcatatagattcaaacgagcttcaatccaatatatctgctgatgtgacttgccatgatagtttatacgtgtcagtgaaatctacatattagtctcatattaaataaataaataaatcattttctcctctcgctctctcatatcctctcctctctttgtatttttttttcaaaatttcaaaacattctttttttcccctcactctttaattttatttttactatttgactgacacgtggatcccaccaacagacatagacgtcaccgtagcatatcacggtagcgcatggaatgggtctagtctatttggacctgtatgatattttgatattcaaaagtatattataagagttcaggaatctagatgatacacgtacacaagtttagatgccgtccgtgcactttacttctttttggaggaaaatttcacgaacttcatgaatcctgtaatatcacacggaacatgaacgctggcccgcctataaatcctaatcgcctaggccgcgtttagagtttgttctgccttctagaggatcgctaggaaagttccatatgatgagacggagcagcgcgcgtccaaaatggtcttggttacggactatagaagacggcaagaggcccatgatttcaaggcccgagacaaacccaacaagaagccgattgccctagcggaaagcctaccatgaaacttccaacgggccgccacccaagtggatccagtaaacggcggacgactccacgggaaagcgcaaccgagcccaactgctaagccccagccatcgtccgctggtgactcaccggcggcgaaaccccggcggctggactcgccagtgatttgccgtatgcgcgtatgttctctctccctctcctctcccgcgatagtggattcgagttgcaaatgtagacagcggccggagcccggggagatcatggcggtaacagaagacgggagattgccagatcgcaaccgcaagtaaggagatcgccagaacggattgtccagcatctcgaactttgttggcttattgtttggttatgattttcacgttggctagaaaaaaaaaactccgtagtacttttgcaattgaggatcccaactctctagttaacaaggtaaaatagtttacgaactatattattctttcttgagtgcatactatagggctcctgatgcccgtcctgctgacgcctgttcctaagatcatgacatcatgtttatctcatatcatctccaagtgaagcacatcaatcttccactacctaggagtagttagtaacttgtacatgctatctcaggatttgatgttccttctggcttctgttaccggtcagatcgctgatcggttttcttggatcaatctgattggaattaattatgcttatcaaggaatttgaccaccaggtaatccatcgcacctcaaatcagaataatgtggttgaggtaaggatcatagcttcccctttcaaaattcgtaaatgatgatatggccatatggccttcttactttagtgctatagaacaatattgcaggtaataccgagacaataagcaaatggccgttaggtgtttaacatccagtactgatatattggagcaactgttatttgttcttaaaactgcaagaggaacatagctgaggctgatttggactcggttttgctgtttttgattaaatgaatcagggcttgttcagtcataagggttttttttttcgccgggccggccagagtacagtcataaggtttgcagctgttctatacttgaagtggaactgtacgaagatacgtgcttagagaattaaggtttccactaataattgttcagaggttgttacagatgagaatcaagaaaagattatgtacgtttaatgcatatctagtacatctgttcaaaatgtgaactaatgattgtctattactttaatgctttgcttgtcatttctgatcattgatagattggtccgtactgccttttattttcaggaataactgcatagcgtaaaagataagtctagatcatgggcagtactgctgtgctgcatgcatgtaattgttatctagctttttgatagattgattgtccatgcagaccatccagaacgttgatgtgtatctttctgacttactgagcccacgatatagtagcttttctgtttcactgtgtttgcatgatccactggttgacagtttgcctttccatctaagctggtagtgaatgtttgtaggagaagcaggaatcttcaatggttgaaagcatctgtagcagagacatgatccatcatcgatcatttgctcgtgtcaatttccatgagatgtaaagcatttccagttggacaggtgttgttcacattcttcctctttttttttcttttttttttgcatttgataagttccattaattctctttcatagaatgatttctcatgtgatgcctccatctaagatctaacttttaggtgaaatcgggctttcaaaggatataggattctagatgttcagagaggtcctgggctatgggagatgcataacaaaggtgtttccactgcatagcagtgaggtatgcgtgtttcatgtattgatccttctgcatttcagacaacttattctttattttttttttcattaggagagggaaagcaacctaccttcacttctttttagtatgaggattagatgcaaactaaaactttgcaataaacttatcagaaaagttcaggttccatgttacgcatattattactgacttgtcggcattgtgatatatacagatatgatagaaggtgaataaagataagcatcgatccatattgtcggaatagttaggttgctaccttgtgattaaaacacgacatttgcagaaacaatgaaccttaggctttgggttgcattcgtttggaccttcctgagattggtccctcgatcggaagatgctatcaagcagtattactcgacgtactaacttccaaacagagttgggacttcagtggatggtccacttctttgttgcaatttctttttcctccaaatcatattttatcgccggcatttccatactaagccagcaaacgattgctaggaaagttgcagttgtcactcatgaagtaatgattgatggaaaaaaaatccacatacatcgctctcgatcctttctccggcagttgatgcatctgaaagtgtgagctttcgcagtgcagattttgcaatcttttgccgtctgatatcacactatcatctacatcaacggatcgacctgaagataaagaaatcaggtaagtaggtaatgcattacatgtaagcatgtttattggtatttttgctgacttcccactgtgtgctttcggatcctcccgaccaaaagagcacctgagttgataaattacaaggtgatcttgtactctaccttagagatatgcaccttttaagcaaacatatttgtactaggatagctctaggtggccaccaaggttagtgtccactcgctgcttcgcacttgtgagagacaggaagcataatttacgctctctgatttctctcgccattgctatctggtgcagtatttgtatgtgcccctgcctcttgctcaatacatacgcatcatacgtttgcagcaccgggcctactacctgagctgtattatcatcagcatatattcacctcaggcatcatatagaatactacaaattagtggatgtgcctccgttgtggagaacactgaaacccaccatggcactatgctcctctttctgtctcactacaggctccaactgttcccgcatgggtttgtcttcttgcatctgcacacgcacagaataattcattcttcgcatcgcaacttgcaaaagctggtcgcttgcctgatgctgcgccctgacgcgtgctttcgctagctaacctttacatgtgttcaggcgtggatggtttgttcagggccttgagtttcttcagaaaatctgctagtagcgtcttgttcaggcagctggtttgatcatcgagcttgaacgctagccctcattgaatgcctgaagccgattgatgggttttatggatggattagtcgaactgtcgaagctgcctggttgtcccagcaagcatgatcgccgtggtgcagatgttgctgtccctctctgcgatcatgtcaattatagcacggagccttcgttttaagttgccatgtccagacaccatgcttccatggacgcggatcagaagtgtacaacccaacgcgtttcacctgtgccccaaaaaaaatgagttaaaacgatgcattcaagctgtggcgcctgctgcccccatcctgcttgttttgcatggtcccccctgttcaggttcagggagagaggtgaggtgaggtgaggtcccccttgcttgggccgtgcgatgcggcagctagcgtgaaggcacgctcgcgagttcggcactcgctttcggtcgggggggccattcaattaagctgcatggacgcacgtaggacggcgacgttcgttagccacggacgccggaacgcttgcgtccacttccccggaaagctcgacggagagagggagaaggccccggtaggcctttgctcaccctgcaacaatatgctgtcgggccgggtcgacatcgacagcccgaggaggaggagatgcgttagctatccagactatctcgacagaggagctcatggtgaaaaaaggattaagtttttctctcgcggttcagtagcttggacattaatggcagccagctcgagcggttgtgctatcacgtccggtgatacagattacaaggggacacggggagtaagtgccaggggtgcaagaggcggcaagcgaagccggcgtggggaccgaccgctgcacgctgcaacctgcaaacggaggtgaaacctctgccctgctacaagcagtatacacgacgtaaacgctgctgacatttttggttttccgtttttaaagcctttcggctcaggtcagaaatcgtatggcccgtggtttttctacgtgtgttctctttcgctgttgctttcggtgtctcaccgagggcaacgtgccaagtgcgagacgccatgaaatcgctggagtcgctcacaaaactgtagctcaaaatggaggtggtgctttgtccggtccctgaaggctgaagcctccgtcgcccctgcaggcccacgtgtcgccctcccgtcgtctcaccgatccatcctgctccagagactactactgctggaggccacccgttcgcgtcaaactccaaaccggcgcagtggccgccttggcgccacatccggcaccgtcaattcggcgcagcagtgagccccattggcattacacgggaaggcccctgtgtcacggagcattcacgccccggtcgatctcatcgtacaaggccacaacgcctgtgacggagacgtggtttggcggcatgggatgatgagaggccccggcgatagatcacgccgtacaaggaccggatagtgtggccatgatgcaagcctgacccgggacaagcgaaaacgtccagattgtttaggcgatcaggttccagctagctgatgctgattttacatgtcacaggtcggcacggcacctctcgcatggtgacgaggttacgtttggttggacggaacacgggcgtgtggccggtgattccaggatcgatcgttcgcggggccgggccccgtgatacggtgatcagaagctgccacacgcaggggcgccggttcggtcactgctacgccacagttaaatctgccggtccggcggaagctgacacgaggaaacgggcatggcatcatggcgcggcatggcgtggcgtggcgttgcgtggcactacgtgtatgtatgcgcgtccgcgtacatgtcaggcgcgcgcgtcagacgccatcgtcgatcgttcaacgcacaccgtaccgtcagatcagatcagatggctgccggactcggacggatgcgtgggtcggaccggctcaattaaagccttttagcctcttcgatggatcgaccggagaacaagacgagggaggaggagagagggagcgtgcatgcatgcagatcgcagatgactgcgcgtcagctgtacgcgcacggcgtctcgtcctgcacggcgcctacctttcgcgtgtaccgtggcgtggcgtggcgtggcgtggcgtgacgccagccaggtagactctcgtacgtggcccccctcgcccgcgcgtgtgccagcgcatggcccgcccccacgtcgcggcggctttgcgcgcgcgatgcctcccgccgaaaggaaagccgagagggcagaagcgccgtgccaattccccctcgcggcctcgccggtgcgtcccccgtttgccggagcacgctgatgctgccggtgacaggagcgagtcctgcctgcgcagcgcgcgagatgccgtacgtgcgtgtagcgagacgcatcgtacggcggctggtgcgctcgtctgtcgaccggggctgtgcctagagatgcctttgcttcccttctttcgtgccgatcgaaccctttttctcttttgccatcgatggtcgaggaggcgacgccatgatgggggtggtgggctaggctaggctaccacccgtctcgatcgtcttttgttcctccttccgagcacacacaccatcatgagcgctctggcggacgatccatggcttttgcatgcgtgccggccggtcgccgctgccctttgaatcgtaccaccaccacaagctgagacttcagaggactcgctcttcagctctcgtctctcgtgtctggaatctctgagccggccgtgctgtccagtgcatatccgacgcagatgcaggtgggagggagtacgccgttgctgttgacgacttgaccggtccaactgtccaagtccagacttttgctggtggcatctgggctgcgaaagatagtttcatcagatggactatcgatcggtagccatgagacgatcgtgcgtgtccatgtccagggaaagctccggtgatctttgtagaacgtggtgttttccccactttttctgagagctctggaactgtgcttgggccgaaataattgaattgacaacaatttatggcctctttggaatgacaaatgttacgctggttacctcatgtagagtgctaatcaatcgcctgtaattggtggacctaaacgcatcccctctggtatgagaaaccatgtagcggtgattccttcgtgataaagtgggtcacatgtttgattacagaaagcccagcttgaatgatgcagatggccggtgattattcgcggcatgcatcatgcttcatgcatgccgcgagctggccagcctgtggtcacttccgactttttcgtgcaactgtgaagccacaaaccaaaaccatttttcgcgaaacaatgcatcaatggcaactactgtcgtttcacaggtctcggaaaagtcttaaaaggatagtcaaagtgatttggccactctcccttctcctttcgatgcgagcattaggcattgatccggttcattgaaccgtgaacttttctaatctcttattaaaccacgaggaacaaatgccgagtcctcatatttttcgtaggaataggattggcataccatattcgcaagctcactatcactctatcagactcacctggtcaaaagaaagggaagaaaaatgctgattagacttggtaaattcatctggaatcccagctctaaaatctccggtaagtaatgcgcctttaacatcttggcatccggtcacactaagcgacgacaggtcagatgctagtttctttttttatacattggcggtcacgtggtttgatagaggtgctagttttttttattatagcctccactatagttttgtaatttttctcttactatatcaatataaaattatacgtgatattatttgttttgaatagtgtttatatcaaatatagtacaaaattggttacaaagtatgacttgaattgtaatactccctcgccaaaaaaaaaaaccaatccaggaggcggtgtgacaagtctagattcgttgtattagaagtggttacatcccctcttaggttggatttttatgggacggagagtgtaggtatttagaatagcagtagagttggatttcttatcctagtctatctcttaaatagagaggcactacatattataacagtacgatcattgtaacataggcgagcgaacgattagccctgacataacttaacaagaattgtcgataccttcttttttttaacgaatcaacgagcgccaattttattgaatagagaaggagaactttacaaagcgaaaggaaaaaaagaaaggagctaagacctttggtccgagctaactaaaagaaagccacctattaagacttctcgctcctgctaaggcccaagttttggcctcttccttgatcttggctaaaagggaggtagctgaaagctccttctgttggaaggttctgcgattcctttcgttccatatctcccaggcgaccaacaacatcaaaatgcagagtgccttcttaggtgtctcttgtatttttgcggtagcctcccaccaatctagcaccgttgaagtttgccgccataggctaggatttatttgctcgcacgtcgcccactacgctagtgccgcccagactctttttgtgtatctacattctgcgaggaggtgcatagctattttctggatccgacgacataaggggcagatggaaccgtttggccaacctcttgtcgccagcttgtcagaggtccagactctgttttggatgattagccaggcgaaggtcttacacttacgcggtgcccaggcttttccagattagcctgttgaagttggtagcggtggttccaagaagttgcgcgttatatgccgatgctgctgtgtactcgtcgtggttagtaagcttccatgttatattgtcctcctcgtgctctaccaggtgtatagcctgaacggcgctccaaaccccgacaagttgatcaatcaggtctgtcgtccatcccgcagtccctggcaggtccaagtcaagaagccattggttcgcttgcgaaggatgatgctattttttaaggaccgtccataatcaatgctctgggatgtagtttgacaaatatcgtgtcggtgctgttagcaagtttggaacttatatgatattctttcacattgacccccatgtcattgtcaatgtctcttttacaacaataaacctatgcatgtttttcatattaccacggctcttcctatgtgaaggatttgggtataaaaatgaagatgcctttagaaagacaaaggctgcgttcgtttcagcctcttcccaacccctctccctcgttttctgcatgcacgctttttcaaactgctaaacgatgcatttttttgcaaaaagtttctatacgaaagttgcttaaaaaatcaaattaatccattttttttaaaaaaatagctaatacttaattaatcacacgctaatggatcgctccctttttcgtgcggaggagatgggttcccaacccctattaacgaacacagcctaaggagaaactacacctgaactgaaactcgcatttcgcttcaagtagtcctgctatgtatgagcatggtggatgcaacacaatgagatacgtggaaagcagatcctatgacttaactacacatatagttgagtcactgatacgtgggttccactttagtaaggtccatatatcagtggctcaactgcacaatagttaaattagataatccttttccgtacgtaaatgcaagccttttcttttttcccggagaagaggggagatgaaggcactagccgtggaacgaactgaacaggtctaacaaccattcaaccaagaggttaggcggcagattcagaacagtggcggaaaatgagcagggggagcacagggaccccaacaaggcacttaaatgcgacagcaacctagagggccctgcttgtcgctggatatgctccaccggtccacatcaaatcccacattagcgcataatgccctgcaccaaacgtagggccaccaaccccttcgcaatattttctccatcagatgttcagaacgaatgaactaatccaatcagtcagttaatagtacagcgcggacagacacattttctacttgaagaactacatatacaagtcaacaattccgtttatgtccatttgttgcctctaatatgtgtatagaatgaaccttaatctgattatgaaccatttcatgcgaaatcatctagtttcatgcttggttagaactagctcagctgatctccatgaatctacggtactgtgcattcgtccgtctccatgattacagctagagtcactagcttattggtgccatctccacgtaagcgacctcatcaggtactagtactaattggcggcacacagctctaacggccgacatgtcttatcaaatcagcaaccgctgatagggagtgaggcctcgtcacccatgcgtttctgtggcttcgactcggccaggcgaaagcgaaagcggctcttctggtcgctgtgctaaacgatttttggagcagtagattagacagcagtgtgctctccatttagttgtgcacaaagttccaatttgacgtataggtaaaaagaagagtgaatttacagcaaaaagactggagtaattagtagtaggagattaatcattccaaagtagtagtcagcaataccacgacacgaacaaaacaaggtcgatctcttgtcagaatcggcgtccgttttacaagggtcagcgcagcgcagccaaccaaaactcccacaatcccctcccaaaaccgaaccgtttctgtgacctgaactggatcctgtgtccccccaagctttgtacttgtacttgcttttggtgctcttttgtgactcaccattgtcctagctaagctagctaccatcctgtcctccccttgactcgtttgactcccttccaatccccctcctcccaaattctacttcaagaaatacagaaaagaaaagaaaaatcaaagagtcctgactttgcaaacagtgtaccagctctgtcttcttctcccctcttcttaacatggctggttgtcaggagcaggaatttacatgcatgcaactcgattacagcccaagcaagatgtagtagacgagggtgataggcaaggcgatgagcatgccaaagatgacactgcgagcaggagcaaaggcaaaaaatgtcagtggcccgtcgattcaggacagagtgcaaactgagagagaatctagtacttacgctgtgctgagaatgctagggtgcacgctgtactccttggcgaagacgaaggggacaatgccctggggcagagctgcctgttcgttcgttcggtttggaccaaacaaaagaacaacagagagaaaaaggttagccaaagcaaaaggctttcgtgctggccaaacgtagaaagtgccgcggccgtggagagcaaaaggcaggagagaaagcagacgcgaacgagcacgaggggctgggagaaaagaacgacgctggctggctgcgcgcggtaggttgcatgcccacccacacggagacctttattttcggtgtgtgactgtgcgtgtgacagtgtgtgcgtatggctgttcttttccgttccggtttacctggacaatggcgacgtgcaggagcgtgccacggagtccgacggcgaaggacgccgccgccatcacggccggcccggccaggaaccgcaccgccatggcgtacgtcgccaccttgttcccgcacgcgatgatgtgcggctgcagcgccatgaacagacctgcatgcatggcgagatcgcaaactcaggggaacagctcgtgacactgccgggggtgaggtgaggttagcatggaaacaagagaataccgaccgagactgaacatggccatgccgagccccgcgtccgacaggatcgagatggatttcaggacgatggccggcatctcgaagttccacctgcaacgccaaaacgagacgaacgccttgtcagaaccagaccaccacaccgcaccaccacagcacgtacgagcagatgggtttgggtttgcgagaagcccggggtgtacgcacctgaagcagacgagggaccagatgaggccgatgaggctggagtaggtgttcgggttgcggatgagcttgcgccacaccatgatcaggatgaggcgggtcatcacgctcgtcggcggcatcgccgtcggcgccgccatggccttgctggggtcggcgcccgccgccgccgccgccttctcgtcccctgcctccgcgtccctgtccatgacgcccctgttcccgaagctgaaatcgtcccgctccacgtagtcctccctgtccttcgctccatccactgacgtaaaagaaatatacgagtcagtacaaattagcccaagaaatgctccccaaatcaggcaaatagtacacggtgaagataaaagattgctacttttgcggggggacttgactgccgcggcgtcgttgtagtctggcgcgccgccgccgaagacgtcggacacgggcgacgcgctggagctccagacgaacatgtggaggtcctcgcccttggcctgcccgttcgtggccgccttcttggcgcccttgggcgccgacgacacggccgggttcggcgccgggtagtggcccgccatgggcgccgcattcgacgccgggagcgggtacttgggcttggacgcgtcgtcctcgtagttggacgggcgcggcgtggcgccggtgcggacgccgaacgcgtcggccgcgccgaagttggagctgcggcccaccatggagtagaagtcggtgtggttgaagcttgaacccctcggcgtcgggttccgcgacgactgcagcgagtagatctcggcgttggtgaggttgctcggccgcggcgtggtgctggagaagcccatggagcggcgggagtagatgtccgagcgagacgcgttggagcggcgcacggtgacgtgtatcctgccgtcctccttcacctccgtctccgtctcgatggcgtccctcctgccgtccagcgacacgacgtccgggtcgacgacgatggaggcgatgttggcggcggtgtccgggaactgctcggtgatgagcatccgggcgccgcggtactcgaacatgaagagcatgagcgtgtaccagatgatgcactgcagcacgacgatctgcaccatgaggctgccggagaactccccgtacatgcccttgagcaaagggatccccatgacgagcgtgttgggcagcgtggagagggagaagagcgtgatggtccactcgaggctcccccggcggctgaggtggctccacgccgtgagcatggccagcaccatcagcttctgcagcgtgtcggcggcgatgaaccggaggttcatcgtgtacgggttgttggtggagatgaagtggaacgacagcagcggcacggcgaagagcgccacgaagcggttgatcccggagcactggtccggcgtgaagatgcgccaccacttcaccgacccgtacgccagtatcatcgccacgtacaacggcaccatcgccgtcatcacgtggtagaagtccgccgccgtaatcatcttcgccccccctcttccctcctcctcctcttcctctcttgcttcgagctcagctcagcgctcactcggtggcactatttcacagctcagctcagctcagcgagaggaggcggcggaggaggagcatttgattgggtgtgtgcgcgtgcgagtaggatcggtcgatgggtagcgcggttttatttaggcgagatggcagcgcggcccgagctcggtttggaccatcccttgtttgcttgcctttatctatcgcgatgcgctgtgctggtagtactatctgcgttctgcaacccgtatgcggtatgtatcccaacccagatcgagcgagaccgcccggcgaccgggttggtgacagccgccgagccgtcacgcgcgcgtggatggatcgagctgttgttcatggggctcgtacatagatacgcccccgcccgggtcggacagggcttttgccggctgattcgcgtggtgtactactattgaaaagtactatacggtatttgcgtacactatgcatggtccataccgacgtactaatagtccacgccatgttaggaaatacgaacaaaaattacaagactgtgtcatgcattcctgtcgctgtggctcaaactattcagaatttcagatcagttgtttttttttttgactaactcagggggtggggggggggagtttgcatatgaattgtctggtaagatcagttgtttttagtgatgagagacattgcttccggcgctagactttaagacttcgtggagtgtaaattgggcgctttgaatcgaattacgcctctgaaagtctcggtgaacaaaatcaattcccgtttttattggattcgaggtacgtacagaagctcgtcagtccgtataggggacggcggtcagtgacgtgccagctccctgtccttgccttttgtttctgccaaatctcgagtgttatcggtaacggaatctgaaaaaggagccatcaaaactaccacaaatgtcccgaaaatcagatccagaaaggaatctgctagtgctagcctgcaccgtagatgtgaatattcctgaaacggcaactcggtagtcggatccggaccaatcgccaccatatctttcaactcctccactggcaataacttgcagctatagaagtcaatgaaagctcaagcggtagcttgctgaggacaagttggaacttggaagtgagggaatttcatgtgtattttccagagagtaaattcaatcctgtagccatcacggaaaaaataaaagatattactactccacgatttaaacattgtagcatcggtagtaaaagcttagaattcagagttagggggcgttgcttgtgattgttccatcattgaattgcgtaatgttcaattctgatctttcttttgctaaagtttactccaatacaaacattctatcaagtagtactccattttagtaatttttatcaatatactaagttatagatcaaataatctaatcgtgcaaatgcaaacacagacatgctagctagtctccacctaattcaacgctcgcaaatactattcccattttcttttgcctggctaccagatagatcacccagcttaccattggagggaaaaacacaagtccaagtgcgacaaattgccacaaacttctccatttctgcacgggaagccgtgctttgaacagtgcgcagggccatatttaacagcaggagtagatcgtaaaaagaggcagggaacatgaagattggtagtggcgactaaaaaaagggcgagctgaagataaagtccctggccacgctcgcctgctgcctccgttcccgcgcatgccacaccccgccatcatcgtctgctgcactggcagtctagcacaacgaatgccacaagaaagagctccattgtgtcgcaaccttttgatttctccttcgaagcataagatttattttcagccgttggatctcggttacggacggtgtaggatcaccctgttctaaccggagtagaaattttttttcggtttctgttaaccttttgatgatcacttctttgatccaagcactcaaagctgactctgtccaacacgtgcgtgcatgcttcaccgtcggatggttcagctgtaatatgggtttaatggttccaaactttttttcaatggcagaatttgtcggttaaaaaagagttgtggtgtgcgtttttgcctttcacattttacctccacatggctcctctttgttgttaacggtaacaaaagagcaaaaggacgatgaacaatgctaaagcgtgctcctaaaatacccacaaaagctgctccggatgtcagatttttgttgatactgtccttaaaaaacttgcaattgcaagccttttatcctgtctcttgctgtgtgggaataaactttgaacaggttccatgccctgggcccaccggacctgcttacgcgacgtgcacataattaattccaagtaccattatcggctgaaaaaaccctacttacccagcacagcatgtactgcacgggccagcgagacgctgtaaagtgcacgagtacgagcacttgcatatggtgcccccaacatgagagccactacgacgataaacgagttaaaaaatggcgagaaagaagaggcgttttctcaagagaaaaagggccatgcatggcctgtatattgtttaggagatgatcaaatatcatttgtacgcccagattccaaatgttctgctgcccaccacttagctttattgttagctttgtgatgctctagcttgtcataagccaacgggtatttgtttacgaatcgtaggctagtagggtttgtagcacattgctactagatccatgaaacgggggattttgctcctggagcaggtgaaaactcccccaagattagctcccatcgaagcctgtttcccggaacgaaagattgttcctactgaaacccgcaaactaaagctagtacccatttttcttcagagaaaaaaaaaacaaaaaccgcacccgttggccgttggtccctgatcgagtagctgggatccgtcgtgttcagcaagcggatagatgccgtggcgatggaacgtgcactgtagccgcgtacattctgtccagtggcgtccgcgtcgctgccctgtagaagatcccagtagacggatcgcggtgcaagcaagagatcgaaaccgtgctactactgtgctagcctagctagctctatgatagatttggagtcaaccgcgcgcgcgagccccatcctttcgtggcaccaaactccgcggcgcacgctggagagacgacgacgaagtgaacgaacactaccgcgctgggcgcgcggctgccggcatgggcatgagcatcggcgtggctcgctcgctcgctttcgccgataggtaggcgatgatccacttcgcgtgttctcgatgggaataatactgtactgtactgtactgaggagggtggtacgtacggctcgatcgatggagacaaagctcagctagtaggtgatgggctcatggatggctgatgcgtcgttcattccttctgtcggtttgcttctacccgtgtagcgacgtagcgtagggtgggtcggcctcgtgtcgcgacgaccgcaacgttggtgatggtggtgggtagcaagcgcgggggcttggccatcctcgccccaagtcgcccacgccgccacgacgccccgcgcgccgcgggacggacgccgagatggaggaggaaaaacgtggggcgcttggtgggatggggtgggattggggatcgaagcgctggtccaccatccgtagccgagaccgaggcccaggcgagaagccatgctccctgctgggccaagccaacccggtggaaaccgcgtcgcacgagcccatcagctgcttttttgctgcgtggtagaagaacccggtggaattcgatgcagatgctagcccatccgtgtatcgacatcgacaacagtaaaaaaaaacgcaacatatgtatgcgtccttataggaagaggaaacgaacaacacaacatgtatatatgtatccgtcgggaagggaaaaaaaacaacccaacatgcttcggccgcacccagctcctcgcattgcacacgatcgtccttgcttgatctgcttaatcaattaaagcagtgtctgtggttccccaaggcaatcgcatgtgcttggtgataggactactatacatctgcatttaatcgtattaacccgtgtgcacgcgtgcatgcatgatggctcccggggctaatttatcgatgggttagaccggtcaaacctcgttcagtccgtcgctaaactgcttctaaagaggaagggagggaggaccattagtccttgcactgtttgggagaagttctctgaacctggaggagccccgattccggtagccccagttgtttgttgcccacagccatatgccaatgtgcagttgcttgcttctaaagtcaatcatggccatgcattacatgcagggttgtccctgccgtcttcgtcgtcatcgtcgccgtcgcgtgtactgttcctcttgatcgtcgtccccccccacgttttgcagatatttggggccgaattaattagaacggcgtggttataaggtgcttttgatgggctggtcctgatcatggctagcagtggggaagagcagaaaaaaaagagaaaaagagaggcatattattctagttcgatcgatcgggagaaccggaagtaaagcggcggagaattgcagatgattgatcgaggagaacgacgacgacgccggccgtacggtccctagtctgtaaaacgaagcatcttttttcctcttacaggaccagacgctgatcttcatatcgaggatcgatctcgcggccgtccttctcgtatcatcggtgctgctttccagctcgatcgtctccggctcgatctacggccggctggtggcacgttgctttttcttcgatgcttagagggaggtccagcacgatgtgtgctactactgtgctagctagtgcatgcatatatatgctctgccgatcaaacagtttatgcagatcataaaaaaatgatgttcgatcttgagctggtagcgctagggtcgactgtgcgacacgttgttgggatgtatagtaggattgtgtttttgtgtggagaggatggcgtgagcgttgcataagtgttacgtgggagacaatggcggcagaatttgtgccaaacattcctcggttagatagagtagatcagtggatcgagtagaccgaggtttttgagatttgagaattggagggtggtcttcctcaactcgcgggatggctgtccagcaatggaaggcagtcgcatatctattatattattaaaggaatagaaaaaagagacttcacgttcgctctcatggcctagaaattctcacattaatcaaagaaaaagaaaagacacagtccatatagaaatacaatttagaaatagctgaaattcggaattaaaaaataaggaatattagaagaggagactagagtttatataggaatacaattagtaaagaatagaaattcggaattaaaaataaagaattttagaagtagagtatatagttcatatagaaatacaattaagaaaaaaaatagaaattcaaaattaaaaaataagaaatattagaagtagtgtacagagtccatataggaatttaaaactaactaaaaatcggaataaaaaggagcctccacgttcactctcatgacctagaaattctcacattaatcggagaaaaggaaaaggcagagtccatatagaaatacaatttagaaatagtagaaattcggaattgcaaaataaggaatattagaagagcagactagagtccatatagaaatacaatttagaaattgttgaaattcggaattaaaaaaataagaaatattagaagaggagactagagtccatataaaaataaaatttagaaatagttgaaattcggaattaaaaaataaggaatattagaataggagactagaatccatataaaaatacaatttagaaatagttgaaattcggaactaaaaaaataaggaatattagaagagtagactagagtccatatagaaatacaattaggaaataactgaattttggaattaaaaataaggaatattagaactagagtacaaagttcatatagaaatacaattaggaaataatcgaaattcggaattaaaaatagagaatattataattagagtatagagtccatatagaaatacaattaagaaaaaaaaatagaaattcggaattaaaaaaataaggaatattagaagtagagtatagagtccatatatgaatttaatactaactaaaattcgtaataaacataataaaattaaaagtagagtttagagtctgtataaaaatacaatttacaaataactaaaattcaaaattaagaaaaacatgggaagaagagtttaaagtcaatataggaatacaatttagaagtaactgaaatttgaaattaaaaattaaagaatattgaaagatgagtttagagtccacatagaaatataattagaaataataaaaattcagaataaaaaaaacaaatattaaaacacaagtctagtgtccatataggaatatatataatttgcaaataactaaaatttgataattaataaaataattaataactaacacgtatataaaatacaatataaatattacacattaatattttcgtaaagttattgcaaaatttaaaattatgttgtcattgtaatatattttaataatataatgagaaaacatatatgctattaattgagagaaaatataatgatgctagccgcacaatctacgcgggccaccatactgtttgtatatatagcacgtttagccgtacaggtagtaacagataaataaatatatggtgatggactgatggtctcaaatatcttagtactccttgtggttggctggtgcgctgtatgattagctaagctgcaacctgaagtgcttgcactggtactaatatatactctctccgtcccattttaaaagcagccatgaatttccgtgtccaactttgatcgcccgtcttatttaatttttttataattaatatttttgttgttatgagatgataaaacacgaatagtgttttactcgtgacttatgtttttaattttttttaaattgttttttaaataagacgaacgatcaaagttatgcgcgaaaaatcatggttgcatttaaaatgggacgaagagagtagcagggaatatcttatctagacagcaataatataaacatcttttgacaatttcccattgattagttccctgatttttcacataagcaaaatcttcttccctgacgaagttgacaatgttgctccgagagaggctgcctgtcatggaggacatatgcggttttgtatagtataaggtaatcagataaggtcattgcggtatgaaattacagacacgttatcaggagtgcaaaaatcagtggataagctgctgtttacgacttgctagagaccaggaaactatgtcctgattcctgaaccctcctaattgctagagtatcagatagcggcaagcaaatacttgggccatttcaacctgtcccgttcaagagcctgtctaaaaaaagagaaggccattaatctttgggaataagttcacttggtgaccctcaaaagtgattgaaatctaatccgtgaccctaaaccacaaaaccggatatcttgacccccaaagtatgaaaaccggtgcaatttgactccctcggtggtttcggagggcggtttcgctgacgtgccggtattgacctagtctgtgtgctgacgtggcgcttaggtgtcatttcaattaaaaagttacaagtggggcccgtttgtcattcacgcacacaattgtagggcccactgacatgtggccccacatggcatcttctctctttcttcttcttccttccctcccttctctctttctttctccctctcccctacggccatccgtggggagcgagcgggcgggagctggagcggcggcgaccgtgggctggagctgaagcggcgggctggagtccatgtcacgccgctcgccgttcctctcgcaccaccaccacccgcaccacccggcgcccggcatcgagacatcggcggcggccgagcggcagaggcggcagcccgcgggcggcggctgtgggtggcagcgggagggtgggcaggcgagggcggcggcggctcgtagcagtgggaggatgaggggaatggcggcgggcgggagaagcaggccgcggcggcgacttcgaaaccgcgtggccccacgacgaggcagaaccactcgaggagagggatgagggagagcgcgccgtcgaggaggtcgcctcatgccgtcatccccctatgcggccgtccaccaagaggagaagcgccatgatctggtcaccgccgccgccgccgtcctcgcccgcccgccctcccgccgccgccggctccccacatcctcccactgccacaagccgctgccgctctcatccgcccaccctcccgcccgccggcccccgtccctcagccgccgctcgaaccgccgccgacttccctcgtcctcccactgccatgatttgtcgccctcacccgcccgcccacggtggagctcagcccgggcgccgccgccgctcgcaggccgtcgcgcctccaccgccgtctccaccgctcaccgtcgtctccgcccgccgcaggagagagagagagggagcggcgggaagagggaatgaactgagggaggggagagagaaggggaacgtgggtcccacaatctatgtcaatgacaaatgggtcccacacatattttttaattctaaatgccacctaaacgccacgtcaacgccacgtgtaaaggagacccggtcaataccgccacgtcagcgccacatcagcgaaaccgccctccaaaaccaccgagggagtcaaattgcaccggttttgtggtttagggtcacggattagatttcaatcacttttgagggtcaccaagtgaacttattcctaatctttgtgcagtggctcctaagataggccgtacagtaaagcccaaataattagtgaagggccatgaagcccatttcagcccatggaggcaacaaagcaaaacgaccagcccacgtaaggggggcgacagagaagcccatgaccaaccaaaacggaagaggtacagtccattagaagcccaactgctcgcaagttgaggtggcccacctaatgtttgggtcccaccatcaggaagcattatctctcgccccggcccagcacatggcacgaaagataccattcacatgacgcgtggggcccagctggggatagaaacgtaggtcccacctggcagctgcacgcacgttgtggtgggcaggacgtgtacgcgttaccattgcgcagtaatgacaaatacccgttgtccactactagaccactagtgcatggcaagtgggccggcaaaatccgccagatcagcttgtcagtgggcagcaggaaaaagttgccgggtcgggacccacccgatagtgtgggaagtgtcaatggtgggtgggccctacggaacgcggcccacccatcgtgctactagtgtgctagcactgctacagtagtaccggtacgaacggagggcgggaggggccgccgcctcccgttggtttcgactttcgtgggccgggcccacctgtcattcaggtcaggattgacggtggggtgggtgcgctcaccgtgagccgcgtccacgcaagccccagttgcttatccccgctaatcacttttttggcctttggctgtttctgtttagacttgcttcctgttgcgttcctatcttttactgacatgtggcccagaggatcaggtggccccacgtgtcagcctcacggacatcagcgacggtccgaatatactggagcgctaatgaaaaacatcctcctcgtctatcccgtgtgtggcttgctaatcacgagataagcgcacacaaattctgtattgattacgcggaatgtgagacgtaggttacgggctcttctcccccccccccccccccccccccccccttttctgttctgtttgcggtagaagtcgttgcggaatggcgagacgataacaagtcggcttaaacaaatgccgttttgcccagtcggagatgagtcaatacctgcctaaagttgagttaccccttccgcctcagcgtcagtggccatgtcggatccacccacccaccaccagcaacagtgggcaataggccaatagctgctgctgcgacggcgacctcggcggcggcggcggcggcggtggcgacggcatgaagaacttcttcaggaagctccacatcggggaggggtcgggcgacggcgcctcctcgtctccccctccaccgccctcctcgaggaaggggagcggcggggtggggggtaatcatcacctgcacgccgagcagaggcagccatcggcgtcggcggtgtcgagctggcttgattccgtcccaggtcggcctcagccccctacgccgtcgacgccgtcggaggcggaggggtcgccgttctcgtcgtcggtagggtcgggggcggaggagaggaggcaatccgtggcggctgagaggaggagatcgcaggaggaggagtgggagaggaggcggtcgcaggaggaagaggccgtgagggagatgaggcggtcgcaggaggaggacgaggtggaggagcgagtgataagggagtcgtcggaggcggaggagaggaagcgggtcagggagaaggaggacgacgaccttgaggagttccagctgcagcttgtgcttgagatgagcgcgcgggacaatcctgaagagatggagattgaagttgccaagcagatcagcctgggcttctgcccgcctcagagctctactgcagaggccctcgcggcccgatactgggttagccactctgattcatttccatcgctaattagctgtttccatggtgcaattctgatagtggaatagactccatgctgtgaaaccggttgactttacatctttgactggctgggcagtgattcagtgctggagttcatagctagtgcaattgcatcgattgggtgatttttggggttggtagcacgagcttagttgtactttctgtggtacattacattacatacaatgatcttctgcagtctgactgcctaattgctgaaacctagtgtctgtctgtcagataagttaaactttcttatcttgtgactaacatcacccccagtataattttcactgcttgtgtgggttctggagtatgattctagtatatcctttataagattgggccttacttttttgaagtaattgttatttgataatacaaagaaacacagctctattgtgtttttgaggaaaaaaaactaaatgttatttgttgctattcagcaatgcattgtggccatatgtaaaagaggcctgttcagtaatgaattgtagccatacgtaaaagagaccatacattggtatgaatcgcacatttaatcaacatttttaaatagatgaagcattcctcatgtttctactcaacacactccaaagttctgtacattccttttttcttaacatggtccattttctggtgtctctcatatgatagaattgtttatgcctcacagaatttcaacgcccttggctatgatgacagaatatcagatgggttttatgatctctatgtgactgggaatggcccggcttcaataaccatgccctctcttaaagatttgcgagcgcagtcactatcacatagggtcaactgggaagctgtattggtacacagaggtgaagatcctgagcttatgaaacttgaccagacggctctaatcatgagccttgaactccgtgaatctaaaccttcagaatttgttggaaatgatttggttcagaaacttgctggcctagtagccagacacatgggtggaactttttttgattctgagggcatgttggtgaaataccagaaaatgatgagatacctgagaaccagtattggaagtgtagttgttcctcttggccaattaaaaattggtctggcacgtcatcgtgcactgctatttaaggttagttacttaataagacatattaagtatttaagattagtgtggctaatctccaagctatctttgttgctctagtcctgaactttattgacaacgagaatttgcccaacatggacactgaacattgaatgccatctgttataatgctttctatatttttctctacttcaaattcagtgtataagttctatacattttctctttgccctaatacaatagaagggtgacccaattaccattataagacacattacacacaaatctatctatgatagcaattacttttcttaatggttacatgtaggttttggccgataacattggtatcccctgtcgactcctgaaaggaaggcagtacactggatcggacgatggggctttgaatattgtgaaatttgatgatggaaggtattgcatcctttacaacatgaacaggattgtgttggacaaataaacatgagatagcacaagtgtgttctgtcctgatagtattggactttctatcttcatgcattcacttttaagtgttggtgcactgaggattgaaagatgtaataagaacacatttcacttcataaccatctaaaccgtgctgcattttgcagggagttcattgttgatcttgtcgcagatcctggtacacttattccttcagatggtgctgttttgtctacagaatttgaagaaagttccttctcaaataatcatcattttaacaaagataatgacatcaggcagttgggatcttcaaatagtttatcgaattctgcatgtagttcttttgagtgtgagttacttgacagaagatctacatggatcaacgttggtccttctgatagtgatggagctacaacgagccagacaagtaaaaacaatcaacaaaatacactatcagattcattcgggattttatctgttagcacattcactagtgaaaataggcctattacaaatgaatcaagaagtacagacgacattgctgccgcaaagaacaaagaaagatcaagtgtaacaattaattcttcgtcaacttcaccttcaccttcttccccagaagtaggcagtactccagctgtccggaggatgaaagtaaaggatatttcggagtacatgattaatgctgccaaagagaatccacaactagctcagaagatccatgaggttttacttgaaaatggagttgtagcaccacctgacttgttttcagaagattccatggaagagccaaaggacctcatcgtgtatgacaccaccctttttcaaagcaaggatgaaatgaaaaagaggatgaatgaacttgggtcgagggaatatgctgatcgtggtcatggtccattattgcctcatcatcctggacatgaactcccatcaaaagttcctcaccgggcacctctagactcacttaagccagttgagggtttgggcattgaccacccccctgacatccaagataacacatcttttatttctcagtatgaaccttctgcacctccccaggaagcttcatcgcagcttacaaagcaattgcctgttacggctgctgctgttgcaactgctgcagtggttgcgtcttcaatggttgttgctgctgctaaatcaaacaatgatgtgaactttgacgtgcctgttgcagctgctgcaacagtcactgcagctgcagttgttgccacaactgctgctgttagcaagcaatatgaacacttggagcctggtaatcagctgcatagtttaccaagtccctccgaagggaatgaatcaatcgagaaaagtgcagatgagttttgggataaacagaattttgaaattgatcatggtcaagataatactttggatcaagaaaaagattcagctgaagttcgccaggatgctgaaagaacctcagataagtcaagcggaacagagagtgcaaaatctgaaatcactctggatgatgttgcggagtttgaaatccaatgggaagaaattactattggggaacgcattggtcttggtaaatttctttcaatttattcaaacagttgttttcttagtcatgctactgttccgttgactgtctgtaaaatcttattgtggttttctttctcttaaattgatccaaccttctgtgctccaggatcatttggagaagtttatagaggagagtggcatggaacagtaagtgtttcagtaaaaatatgctctcttacattttaatttgtcaacaagttccatgttattatctgaatgcaatcggcacatttgttaactgtttgatctctcgaggatgaaagatgtgaattattgttcactgagataacatacataatgttcatgccactgtcaactattgtaccgaatagaataactccctacttttttttctaaaaaacttgattatattttataatgaaaaggttcagctttaaagataatacattgagaaaccactatagccatttgattagttttctgttgcccagtcttgtatcaaaatgttttcacctggaaagctacgtatgatttcttcgcaacagacttcaatattttgtgaaaaaagtgttttaatatgtctaatttttgtattcagctgttttcattagtttgaagacccatcttttgttatgcaccatcttcttgaaagttctagcaaatcttatgtttaacagtgtatcaaaatcgctttgtttataggaagttgctgtaaagaagtttctgcaacaagatatttcaagtgatgctctggaagaatttagaactgaggtataccatatactccataatttagttcaaatgaccaaatagtctgaagtacagatgttttggcttcttgcctgtgttcatatgtttgtgtgcatgctcatgtgttttattgtgcatgtttgcacttgcagcatgtttgcatattaacctcatgcacacaccatatgagccttatagtaatgtattacttttcatgtttaggtgcgaataatcaagaggttgcggcatccgaatgttgttctcttcatgggtgctattactcgtgtacccaatctttctattgtcaccgaatttcttccaaggtatgtcttgttgttattggtgtaaatttttacatcacatttatgtttatttcatgtaggaaataggaacttaggatcatatactagttaatgttttgttcagaatttgatgcgttaaaaagataaacttcctgttttgtaattcgagctgactcagttgacctgtgtcatagtatcagacatattttggaacattcacctgcaaccccttaaagaacagtgcattaattgtggggatagttgctcactttttttaggaactctatattattaatcattcttgcccctttttttttctattggtcttgcagaggtagcttatttcggttaattcatcgtcccaacaaccagttggatgaaagaaagcgcttaagaatggcacttgatgtggtatgcatgatttgtgactctaaatctcaacttattgttaacacagttgctgataactgataagtgtggagaagccaaatattgtttactaagattccttgaatggtccctaggcacgtggtatgaattatctacataactgcacaccggtgatagtccatcgagatctgaagtctccaaacctactggttgacaagaattgggttgtgaaggtaatacacaagttgcacgatagcaatgaaattcattttccttcaatttctgttgcaaaccacttacgtttttgcaactaggtttgcgactttggtttatctaaaatgaagaacaagaccttcttgtcatcaagatcaacagctggaacagtaagctcgaacgatttcagaaattttattataactttatttgagcaccaatcctgtgcacatttaaaatggtaattgttgcgatgttgtgcaattttagggagattaagaagtacttccgtctgcatgattaaatttgtttgaagtgttttaagttctacaacacttaattatttgtgcattgttatgaaaataacatactttatgctttgcaattgtgtgcatctcttcagaaatgtcaagcggcaagagcctgggttgtctgctttttcagctctcatattgggagagttttataccagatgatatattactcttgtgcatagtattttccctcttcattatgctatgtgcatataacaagggattgaaatattttgaagtataatccattgtgatccatgtatataaaaaaagattggaatgaaggaataactccaattatcctagtctggaaggaagatcgatgatgatagtgatgaatcaaaggggctcaaaatatattttggactttacagcaatgttcctactctctgtggaaattttttgtgttatgcccataagcccatttgttctttgaggattttatatgattgatactcaaatcatcttttcaataagaccaccccacaaatgaccagctgaaaggccatattaccatgtagtggatacgcagtgttcactgaaagccttttgtgacataaagtttgtgcctgaatcacactttttttttgttcttctggtttcgcctgattttctatggtcaatttatgttaaggcaatgtgtagtttggcttggtttcatacaataagatccttgattgcactaaatactatgctatctaattagatactccctccatctacttttgatagtcatatttccaaatctgaaaaatttatttttaataggcatatttcaatccaacaaactatcatcttaataattttctcgaatttaatgcgtgactctccattcttcacacatgattggctacatgggcatcgagaaatgtaaatattaatgaatcgcttgtttacgaggaatgactggtactagcatatttaaatggatgataagtagaattacttatacttggtctgtgtgtcaagatgaaatatgattatcaaaagtagatagagggagtactaagcattaaagactatgctgacaaacaatatatagacctctaaaagcttataagctttataagcaattctccagtccaccgtcctcgggtttatctgtgcaagatttcatagctagctggattgtttagagtagtttgtgacatgatttaagggtgtcaggacttcttgtgaactatggaatgagatttatgctatgtatgggtatcatctttgtgctatgctattgactgttaacattgttggcactgaatatttatgttggtgtgcaggcggagtggatggcacctgaagtacttcgtaatgaaccatcagacgagaagtaagttctaaattctaaaaactaagctctcagatgtattcgtaccttaaatgagtttgtgattgcttaaatggctgtgcatattggcagatgcgatgtttttagctatggggtcatactgtgggaactttgtacattactgcaaccttgggaaggcatgaacgccatgcaagtcgtcggagctgttgggtttcagaatcgtcgccttgatattccagataacactgatcccgccattgcagaaataatagcaaaatgctggcagacgttagtgtgcctaactcactttgtcgctcatctgcattcttccggacgcactaaaacctgcattccattttcggaatacacaaccattttctcagtgttgcttcctgtatttggtgtagggacccaaaattgcggccatcatttgcagatatcatggcctcattgaaaccactgctgaaaaacatgaccgctcaagcgccaaggcagagagtacaacaaaccgacgagtaagaaaaaagaggatgttaccagctgcccgaaggcctaagtatagcatttttttttgttttttgtatagtaacaccaattgtgtgttcgagattggaaagcgtgatgatgttagtgtgctgggtatccatctgtgaagaccagcgctgccaaacccgtccacgatggaggaaaattgaacagcggcaagaaactgtgcaaacgcgaatcaaatgtttagcacagttcttccccaaaaacaccagtctcaggaaatcacatggcgggcggaagttacacatgcttttttcataccatctctcttttcctttatctcgtgttctccaccaaatggtggtatttgtgtaatatggcaagaaaaagaaaaaaaaatgatttgctgtccatcaagaaaatgaaaaaggagaaaacggttgttcaatcgtgctcagtgctcccttccctgctgtgctgatggccagcattttcagaaagttttaaagattgagcaaatcttattatatcaattgttatcctacaagaccatctgtttttacattgctatttggccaggtgtgtttggagtgttctcagttgtgcatttgcttgtgggataacaaatggaatggggactggttgaaggggtttaataagaggaccaaaaaacttgtggcagtaggggatgcagcatttctttgggagatttggaagctaaggccttgtttaattcccaattttttttccaaaaacatcacatcgaatctttagacacatgtatgtagtattaaatatagataaaaaaaaactaatcgcacagtttgcgtggaaatcacgagacaaatcttttgagcctaattagttcatgattaaccataagtactacattaacccacatgtactaataacggattaattatgcttaataaattcgtctcgcggtttccagacgagttatgaaattagttttttcattcgtgtccaaaaacacctttcgacatccggtcaaacgtccgatgtgacactaaaaaattttcttttcgtgaactaaacagggcttaagaaacaaatcatgttttgagaacaagttacctaaagatcccatggaagttatttttcaggttgttcactatatctcaattatttcccaatgagccatcttgcagaagaaggtcatgccaagaagcctgcaaggttaatgaaggctgctgagggggattgaatgtgttgatttttgtgccctagggagagatgctgatccctgagtctttttgaataaaaccttttcagttgtactctctccgtgtcataaaaattaatctaatatcagatgtgtcatattatagatttacaaatataaacatactttctccgttaaaaaaaaacccaacctagtacaacgaatctggacaaatagacgctataacccctcctaggttgggtggacggagagagtatgtatgtccagattcataatactagcatccggtactaaattggtttttatgggacaaagggagtatggttaaatgacgtggggtgatgaggttgtagctatcctttgttgcttaaaattgttgtccccctagccttacaacctgaaatagcataattttctactccattcatcccaaaataatttgtacgactagatatttgggacagcctgaaatagcataatcttttactcatccatcctaaaatcatttgtacgactagatatttgggagggagggagtatgatacttttatactgtaaatctcatttttgttaatggaaactagcgtggtggcccgcgcagattgcgcggctagcatcattatattttctgtcatataataatatatatgttttctcaatgtattattcaaatatattaaaatgacaacattattttaaattttttactacctttacaaaactactaatgtataatattcatattgttttttatatacgtgttagttattaattatttttaaatttttttatttataaattatattcctatatggactttaggatcttcttccaatattatttatttttaattctgaatttttattatttctaattgtatttctatgtggactctaaactcatctttcaatattcattaatttttaatttcgaatttaagttacttctaaattgtattcttatattgactttaaactcctcttcccatgttttttttaattttgaattttagttatttgtaaattgtatttttatacgaactctaaaatctaattttaattttattattattccgaattttaattagttttaaattcttatatggactctatactctacttctaatatttcttatttttaattctgaatgtctattacttcttaattgtatttctatatggactatatactctacttctaatattccttatttttaattccgaatttctattatttcttaattgcatttctaaatggactctatactctacttctaatatttcttacttttaattccaaatttctattatttcttaattctatttctatatgtactctatactctacttgtaatattccttatttttaattccgattttctattgtttctcaattatatttctatatggactctagtcttctttttcaatattccttatttttttaattccgaatttcaactatttctaaattgtatttctatatggactatgtttttctttttctctgattaatgtggaaatttctaggctgtgagagcgaacatggaggctcctttttctatttctttaataaattaactatcatggtggcccgcgcagattgcacggctagtatcattatattttctctcatataataaaatatatgttttctcattatattataaaatatattacaatgacaacataattttaaattttgcaataactttacgaaactactaatgtgtaatattcatattgtattttatatacgtgttagttattaattatttttaatatcaaattttggttatttgtaaattatatatattcctatatggactctagactcgtcttttaatatttttttaattctgaatttttattatttctaattgtatttctatgtggactttaaactcatctttcaatattctttaatttttaatttcaaattacagttgcttctaaattttattcctatattgactttcaactcttcttcccatgtttttcttaatttcgaattttaattatttgtaaaatgtatttttatatggactctaaacactacttttcattttattatgtttatttcgaattttagttagttttaaattcctatatggactctatactttacttatgatattccttattttttaattccgaatttctatttttttcttaattgtatttctatatggactctatactctacttctaatattccttatttttaattccgaatttctattatttcctaattgtatttctatatggactctgtactctactctaatattccttatttttaatttcaaatttcagttatttcctaattgtatgtctatatggactctagtctcctcttctaatatttcttattttttaatttcgaatttcaactatttctaaattgtatttctatgtggactctagtctcatcttctaatactccttatttttaattccgaatttcagctatttctaaattgtatttctatataaactcatatttcaatattctttaatttttaacttcaaatttcaattacttctaaattgtactcctatattgactttaaactcttcttcccatatttttcttaatttcgaaatgtagttatttgtaaattgtatttttatacggactgtaaactctacttttaattttattatgtttattccgaattttagttagttttaaattcctacatggactctatattctacttataatattccttattttttaattctgaatttcaattttttttttcttaattgaattttatatggactttatactctacttctaatatttcttatttttaattccgaatttctattatttcctaattgtatttctatatggactctatactctacttctgatattccttatttttaatttcgaatttcagttattttctaattgtatttttatatggactctagtctcctcttctaatatttcttatttttaatttcgaattttagctatttctaaattgtatttctatatggagtctgctttttctttttctccgattaatgtgagaatttctaagtcatgagagtggacgtggaggctcctttttattccgaattttagttaattttaaattcctatatgggctctatactccacttcccatattccttattttttaattctgaatttctattttttttgcttaattgtatttctatatggactctatgctctacttctaatattccttatttataattctgaatttctattatttcctaattgtatttctatatggactttatactctacttctaatattccttatttttaattccaaattttagttatttcttaattgtatttctatatggactctagtcccctcttctaatattccttattttttaattccgaatttcaattaattctaaattgtgtttctatatggactctagtctcctcttctaatattcattattttttaattctgaatttcagctatttctaaattttatttctatatggactctgttttttctttttctcccattaatgtgagaattttagctgttcctaaattgtatttttgtatggagtttgctttttctttttctctgattattgtgagaatttctaggtcatgagagcgaacgtggagcctcctttttctattcctttaataatatataatagatagataggcggggaccttggctctccttgttcaaaaaaaagtttgctgtgaaatttctatttcaagttcatctaaaagcactcaaattccagttaaaaaaaaacactcaatcgcgcggtttgttcggctccatgttaccgtctactgcggccctcgttaccgaaaacgcaacgcaatggatgcccggccgccggtcgcgcgacctgaccagttcccagccacgaaaactccccgaaccaagcgcgccgcggcccattgccgcgcctatctatctcttcccgccctccgtgccttcccgccaacgtacaccgtgatcgatcgaatcgagccagccagccagccaccgatatggcgagcgtgttctggggaagcggccatcccgccgacgaggttgccgacttcgacgagtacgaccccaccccgtacggcggcggctacgacatcgccctcaccttcggccgcgccctcccgccctccgacgagatatgccaccccatctccaccgcctcctcctcctcctcctcgtacgaccgcccccagcaaggccggaggccacctgccgaggagacccacctctcggctggccacggcaggaggccggacgacgacgaggcgacgcacggcggcgggtacaggaagcccaagccggcgtacggggacgacgagcagcagcggcggcacacctccggcggcggccgcaagaagcatgtgagctcattccacgggcccggcccgttagcttcacgggccttatatgggttcttgtgtactccggccttccaggcctccttaactttgcctctgttcttcatttagggaggtgacgacgacgatggctccggcgacgagaggaagccgcgatacaagaagcacgacgacgacgacgacggcgagaggaagccgcgttacaagaagcgcgacgacgacgacgacgactccgacggcgagaggaagcagcgctacgagaagaacaaccgccgccgccacgattacgacgattgatcggacgagcacgagtcagttaagcaggctgtgaggacgctattactggctcgcacaccatgctatatatatctctgctaaatgagcaagttattattgtttttggcgaatgaaaataatcgaacttttgccttgctgtgttcttaatttgctgctatctgattactgatcagcttccaatggtatgcttgtgatccttttgaataaaatgtattcgacttcttttatgcctttgtatgtgcaactattcaatgctctttgaggaaatgatgccttttctctaaaaactatgcaatgttcatccaatatgcttagggtctatttagatcccctggtaaaattttacaccatatcacatcgaatgcttggacacatgcatagagtattaatataaacgaaaaaaataactaattacacagattacgtgtaacttgcgaggcgaatcttttaagcctaattgtatcatgatttgacaatgtggtgctacagcctacagtaaacatttgctaatgacggattaattagccttaataaattcgtctcgtagtttacaggtggattatgtaatttgttttattattagactactttaatacttcaaatgtgtgtaaatttttcgttttttatatttgcacaattttttttaataagacgagtggtcaaacaatgtaagtaaaatgttaaaatttcttatattaaaggacgaatgggtatatgacaatctttgatgcggcaggtaagcatcattaatattctccccaaaattagtgttcaatcgatctgatcaacctggttgctggtagcaacaagctcacagatacatgaacaggaaaacagctagtagccgaattgacaggtggtttgatcctcctaatgatatcgcaccacgtcaccacaactcactcacacctagcactaaccagatcgcatttgaggctgcccatgctcgccttctctcacgtgcaccatgacgtctgagcaaaaaaaatggaaataagaagaagagccaagcaaccgtgcatgccactggcgtgctctgcatttctgcaatagtgcgaggcgaagaggatgttgcgtcagaaacggtttgcttttaactctcactgtgagtctgtgacgatacgtaaagccagcgagcattattgggcgtgaagaagcatggttcgacagacttgtcgctgatcgagctagtgacattctaccaagtaccagcctactgcaggtcacgttggttcgaaaaacgacgctgatgccggcgtgcatgatccttggccggacgacgtgtttttttttttagccggaccggtctgagatagccggaccaaatttacttaagagagggatatgtacatgtttataaagtttcaacttcgataagaagttgtcgaagtgaaaggatgttgtcacaggcgtggtcggacgatgtgttttctttagccgggccgatctatgatagccggaccaaatttacttaagagagaggaatatgtacatgcttataaagtttcaacttcgatagaaagttgttgaagtggaaggatgttatcacatgccgactacgtgtttgggttgatataaacgtcgccgtggcgtcagggaaccagccgctagctcgtttcgccggccggggccgctctctgtccggcgaagcgctgcggcacgcgtacgcgcgcgtgccggtaggccgagtggtcatcgccggatggccccgattagttggctggatcgatcgagctttcgagcatgctgggcgtggcgtgcttgaagaagaagattgggctggaccggcgtaccgtctccgtcctgggaagtgaatagggggcagtgtatctttcaagaaaactcaatgcgcccgcatggatggagcgaagtatgtgcagcacacgttggattcagccttacatccgacattgattacaggatagcactctttgaagacttactgataggtgatagccgcagccagattaatgtgtactcttattcgtcaaatatcactttgaagtaaaataacagcaatgaataccatatactaactaatatatatttttagataatgatatactaactaatagaatatatatgtttttgcttctctaatttacatagtgagttgttactacaatattaaaatatagtaatctagaattagaattaaagttgagacattttaatactacgaatctgaaaaaatgatgcataatctctagtttcatggatacatttgagaaactcttaacatcaacaccgattctacacaatagaagaggtagatgctagataaagaaaatgttagcgctgatgcataggctccatggatttttctttattttctaactttgccaaattcgctacgcgtaacttcaattactcccgttttcaaatacttatcattatatactttttatttttaaactatgatttcttatatatatatttatatatataaatataatatatatatatatataaaagaaatatgccatactaagtatattgcatcttaaatgtaaccacgaaactttcaaacatcattatttaaacatttaaattttgcaatggtgaaagttaaaattgtgcgcttcaagagtaaggttgtgttcggtagtttgagttgggaattaatatggcgtacgtaaaacaaagcaatttattaatgcatgattaattaagtattagctatatcttttctaataaatggattaatatgatttttaaaagcaactttcatgtagaattttttttaaaaaaaacatgtcgtttaacttggaaagagtatgtgtgaaaaacgagggagaagagttggaaacttgaactcctaaacatagcataacagatatttaaaaccaaaggtagtgctttttatataaaaatactacaaaacagtaataccgtttcaatgcaatagtttgtgcgtgtgtgacatcaaacatggtaactaggtatcagactttggcatatacaggtatcacatctaatacccaatactagatgtggtagcttgctactacagtttggtatcaatgggtatgtgtccggtattacttataccaggtttggtatctaaggtatcgtgcttacatatgtatgatgtcatcacttagagtcttttattagaacaaatgtacaccattgtcgagtcttttttatttatatgtgggtccactgaacactgctacgcatatgtgtttgagagaagagaaaaagagaagattgagaaaatactcaaaatgagatgatccattatgacatgattaattgagagttaatataatttttaaagcaaacttttctataaaatgtgtttataagaaatacgcggtttagcagtttgggaagcgtgtgcgtgaagaaggagcgagtatttctcccaattagatcacatccacctaaaatctcttatattataggacggagggagcactgcctaatgtagcctaaggagagagaagatattataaaccatatgtggcatggtatgatgtgataatcttagtttcatctacactagacattacctaacagacatgattggttggttgtatgctccaagcactcatttcgttgggttttctcttagcacacatataaccacgatgaagcatttcttaatactactccccgagtatcactctattgcattgagtcgatggcgtacccatacatttctgtatttggggggagtttcagtcaagctgagatcgaagtggccagttagcactgccactgtgcggcgacccgcacaggctttattcgctgagtgcaaggtattttctctagtggccctagattttattatgagatcacgcctaatgtagcctaaggagagagagaagatattataaaccatatgtggcatggtatgatgtgataatcttagtttcatctacactagacattacctaacagacatgattggttggttgtatgctccaagcactcatttcgttgggttttctcttagcacacatataaccacgatgaagcatttcttaatactactccccgagtatcactctattgcattgagtcgatggcgtacccatacatttctgtattcggggggagtttcagtcaagctgagatcgaagtggccagttagcactgccactgtgcggcgacccgcacaggctttattcgctgagtgcaaggtattttctctagtggccctagattttattatgagatcatattgttggtgcttctaattttatcaaaatttgataatatagacatattttcagtgccgtattttgataggctagaaaccaaacatattttaatcaatacttcgatattatagtaatggtgctgtgtacgtttcccttgtacccttaaaaaaagcatcagtcaatttttcttttaaggaaaatagctttcgacaaggaccttggagtacctccaactcacaagctatttggatgaggacatgcttaacaaatatcttcttgtgtttgatggccaaaaaccatctcttaggcattgattaatcaagagtgacggtaagtcctttagacaaactgtgagagaaaatatcaagttttacattaaaaatatattaaatacaacaaatttctctttataaaatattaaaacataaatttaccattgacctacaatttgaaaacctaataggagctagtaactatctttacaccatgacctatatatttttcaatatttaagttggacgcatgaaaataatttgtgaatagtatgtcttaaagaagtactttgtgatggcattatgcccgtattggttttataaatatgttacaataaaaactagcaactaaagttctgtttaaatgtgttaatatccaacaatgaaatgtattcggccggccctagcattttgttattgcactccgaactgcagagtagagatacgcataattatatatactcgctggcttcttagttgcaaccaaaatatttattgaaattcttctttctagactcttctcgcaactatcgcaagagaggatattttctcacaaaaaaaaaaggttattgcacgtaaatttaagcgacaactatgtggcataatcctgtgccttttatttggagcatgcgcgaaaatttctgaaagaataaaacaaaacaaaaaaaagggccccgagccaaccttgaaagctacaaccgtatgagaaaactaaagaaatgcaaataattctcttgtctacaaagaaaaggaaaaaagaaaaagggaaagagcaaagcaaataaatcgtctcatcatcacgagtcgcctgcgaaacaacagcgaaaagaaaagcaaagcttggagagagcttcacttcacgtcttcaccttcctctgctcccggagagcctctccctctcctctcctctcgcctcggcctcctctctctctctctctctctctctctctctctctctctctctctctctctcatcaccgcctccccacgccaacccgcgcgacgcacgcggcataccaagaaaccgcgcggcgcgcgcttcccgggggggcgcctgccttcgatggaggtcgcggccgcggaggacgcgctggaggagagcggcgtggcggtgtacctccccaggcttctcgccggcgtcatctccggcgctctcaccggcctcttcgctctcggtactcaccaaaacacccgccccttctttccccccttgctcgagctgttcatgtgattctttgacgccagcgacagcgagcattgcccgtgagagctcgttctttgctggcctcgcgtcgcgtacgtgttccgatttttttttatgtccgttgtttgatgtggtgctttgtaaaagctggggccttgaccggagcggtgaccggcgcgctggccggaagggcttcagacagcggcgtgctccggggagctggattgggggcgttcgccggagctgtgctctccattgaggtcctcgaggcttctcgtgcttattggtgctcggaccggctgggctctcatggcacatcctccatggtcagtaagcttcttccatacttgcatatttgtttgtccaagaagttatattaatgcgtttgacttcagatgatgtgacctgaagtatttgacgaatttatttctctgaaagatatatgctcattagcctgatgtaacttcttccaatatgctgtgccgtttactttactcctcgacggcttgacaccatgattttgaaatgtatctctcgtctgtgtttgtaagatacgcctctaagaaaaattcataacgatttggtgttcaggcagatttcatagagcagctcctccaagcgcggtttgtgcaagagcaaattgtaccttcaggatatgcaacgcatcgttggcaggtcagttacatgttctgctgatgcaattttgtttgccatggttctcattttataaaatgtttttttatgtgaaaaacctgatctgctggccatcatttcattattctatttgcaaaattggtagttttaaaccactttatttagttgagacaacggtacaaatttattggctagtaggcccgggtactttggaaacgatgttcggttcgcagaatcaccgtttattggaacacatcgttatttattgaagcattttcttttactgattttttttatgttctttgtcaacaggtcagcatttcagattttggtcatgatgatctgtatgatatttttggagattgttcatccaaagggctttcacgggagtcactgaataaattaccacactatgtggtcactgaccaaacacggaactcgtttggtgaagacctctcttgcactatctgcctgcaggtacatttatcaaaattagctttatgttgtcgacaaacctgcctggctgccttgcacaattttgcacatggtttaggttcaacaacgataataaaagcaaaacaacatccatttcatgattgcagacaatatagtgaatgtttagttagcatatttgagctttctcctttttggcaaagtttgttaagaaaatcaagatcaccagtgatttgaaaattggtgatagcataccactacaagtctccatctggttgttagtgatggctgatcacatatagtagtaactgttctaaacataattgccaagggggtaaatgggaagacatcttcaaattattcatgaaattcttttgaccttcttcatagaacgttttaaacctaactcgtcctgaccattgaatacggtctattacttgatcaatgatttccaaccagaaaccaaagcttttcccgaccttgttgaaccaggaaatgcggcccattttttagattgataaatgaaacattcaagtacatatatatagctggatagtagatatgacatgattgttatggtgtgatatgtagagcagggagatgcaacgacctccgtttttatgttccccttttgtggcaacttgcataccaaattatgcctgctactaaatgcaatgtggttaggatttgctttgcaacttgctcactccctacacacactcaatgtcactgcttaattaccgctttgcaggatattgtaaccggtgaaacggcgaggagattgccgaattgctcccacactttccaccagccttgcgtggacaaatggctcgttggccatgggtcttgccctgtatgtaggcaatgtgtgtaacaacagaaggtaaaaaaaaccctgcattctgcaggctctccatcttattagaagagactagttgtgcaaatgtttgctcttgatagcacccaccacagagttaattatacacagtagctttgtaatttactgtactactagataggcgtatcttttaccagcgtaaacagaggctgtaaatcagaggatttgacactgtttcttacgctgagtttcaatgtaaaatggaataaaggtttctctgtcgcggagctcttcaaggccctggacctggagaatatgctaaggccatactaggaaatggctacatagtcagccgtttttacttgctgttgtacagtgtacggtgtatacaaatgtgatggttttttttagaatatcgattaattatagcccgtgcatgtgggaagcccagcaactccaagatcgtgtagtgatggccgcattgataatctgatagggcttccaaagattaggcaggacccgttgtcgtggtcgccatgcctccctgttgtgcccattcctcattcccatccaagcaactatgcaaaggcatcaacagatcaacttacggcggttcatcagtccatggcaacgttcaatcgcccggccatgctgccgatgtcccttgcagaatagctgtatcatgatatcatcagctgcatcactgttcctacgtagtgctgcggctgtgcctcctccgcctgtgcgcgtccgtttcgctcgccactgtttggctatggggaggagaaagagaaaccggggcagtgcgcgtacgagaaagttgattgggttcctgatgttgatggaggcggcagcatcctagtacagcgtcgcatctcatcagagagtaggcgagcagcagccgccaactgctggatggtcgtagtcgcggctcagaatctttgcccaccttggcgctgctgatgttagtccccctgtcacccgccaccaacaatccgcccagataggctgccctcagggctcgcaggccagcataccaattccggccgcattcagtacaaataagaactactcgtagcctactactactatagtactacaacgtactgcagaatacaggataaaagattccccagaaacaagagcaaaaaccaaagagagaggaactgcatttgctttgtagatgccgatatccatttgcacaaccaccagagcttagagcacaaaatctcgaccatgttactgctgagtagatacaggataaggtgtttaagaggaaggtttctgaataggtgcagcttcatgtttatagactaacattgtgtgactaccaggctatgattcgaggattactagttaccatagagctaaatcgtactagcagagaagtcttcagtatttgagcttcctaacccggtacaaaaaagatgatgtgaccttctgttctgtgtctgaacttctattctctgtcaaaggatgatgtatgtacacttcttgggttcaacatcctcaatttttgccttaggaatccatatgcgagtactgcaagaaatagctgcatcagatacattgaagcaccaacaaacaaacggtggcaaagtacaaacagaactacaggattcagaaaatgagaggttaaagaaaaagggaggaaaggtagcagaaagcctgaaactcgcctgggcattcttcagaagttcctcttgctggatatcatcacttgttgcaggatccatagctctctgatgaatcaatcagaaatgtgaagacaaattagtaaacttgatcagtggtaactgaatcgattgtgcatgaaggggcagaaattcattgccttgggcaatccatgacttagtatcctcacaatagtctctttggcctcaacatcacaatcacggagttcaggtactttcatgtcgcgggggtcaagttcagggtcaccttttatcactgatgtccaccattccttctggttttcctttgtcaaaagtatagacagtgtattcccatcctctgaaggaattatcacaaaataatgcatgtcaagtcagtaacaagagtcatgtaggtattgctatcgatgagaaatgtaacaagtatcatcaaactatgtatgtaccaatggtccacaagcagtcattaactttaactggctcaaaaagctccccctgaaaagaaacacaagtagaacattataccagcagttctatacttctattgcaaatgagagatattcttgttgtgtatttaatctagcagcagactatataaaacattctgtatatccacttacatcaattataaaagagcaacccttcagtccaaccttcagatggttcttcataatctcataagtgacaagacttgattttgttccttggggaactggaatggttatggtaacctctggcctttcctgagtccaggaatatttctccaagtccagaccatttccagcattaggcttagggtctaacatgcaatacaaaaggaggatatcctttcagtgcactgaactccaaattggcaatcaaagcgattaaagaaacaataaattcatttagtttcgtaataatgcagtagcacttcctgtctataagtcgaaagattaggatgtcgcatatattttgttggaggaataaggtagcgagctctctacagtacaaaattgcaacggttgttgatactcgaattacagaaaacgtaagagaaccaaacacagtaaaaaatactgctagtgatgagtgatgatattgatcaaatgatccaacagttatatgtgaaggcttgaaatgttgctgttcccattaatagagaaccagtacaataacaacttcacatagtagcctttcaactttataaactgcacaaccattcctttttgaaacacatgtagaacagtagaaaggctgcagatctttgtattaaagatagaaacaaattccaaatcacaaccaataagttagcaaaagcagcagacccaaactgaacaggaaatacagaatctaaaagtgtactactaggtataacatgtataatcacacttatcagcaaatgatatatcaaaaggtggaaaatgcaaggcatgattcaccttgaaattcaaatgtacagtaaaaattatgaaacctcaataattagatcgattatgatggaaattcagtttattagacccgtgaggacagcttagtacagaatctattgtcttaaagcaacaatatgaaaatccacagagaatttttcaaaaaaaatatagcgagatgcatataaactgattgcaaccactatactactgccaaactttggaccttcttgtttctacacatttagtgctctacgaatactgatgcggtgagataaatctgaaatcgatcacggtaaatcaaccaaacatatcatggcgatttggaaattttgataagttgaaaacaagaccaaactacttgcaaatcttgaaggatttatataatctgtatgtgccataaatgcctagaaccaccacccattttaatgttaagatttatccagactaattagtaagcacttgatcaaaattttactcccttcagccaccaatgtgcaacatgagatcggacctgaaaataaaaaactactacatggcaattttatactccgccatatctgcaacctcgaaatctgaggattatagctccactatagaactactacagatcgagaactgatcgaagtctagacaagtggccctagcttggcacaagatgggaaagcacatttgctgattcaaactcaatatctgcccccaattccgcataagaggtagagatcaacaggcgaaatgacaatctataatcgaataagagcatacaggtcaccgaagcacgcaaacatttcgcattcgaacacgatgaacaattagaaggtcacggtgcgagatcacccacctcttacgcgctccactaccgctgccctctccaccttgtccctccccgcctctctcatcggcgtcctcggctcctccttcagcatctcctccgccttcatcggctcctcctccttcagcatctcctccgccttcatcggctcctcctccttcagcatctcctccgccttcctcggctcccccttcgccctcttccgcctctcctccgcctccgccttggcctgggcttccaccgccatctccgccaccacccccggtgcggaggggtcgaggaacaggtcggatcgccgctgcgcgacgtcgatcgccgcctggaggaacgggacagggccacccttgcgcgcgagcaccgctgcgaggacctcctcgtcgctcctcccagcgatggccttcgtcgccgccgccgccgcggcgtcgatcgccgcctggaggaacgggacagggccacccttgcgcgcgagcaccgccgcgaggacctcctcgtcgctcctcccagcgatggccttcatcgccgccgccgccgccgcctcgtcctcctcccggagatcgatggtgacctcccggagatcgatggtgaccaccattgcgtctagggtttgggagcggtttctgcgtgcgcgagattcgcagaggctttgcgaggaaggaagcgttggattggattggagtcggaggaatgggagttttcgtttgggcccgatttatatgagaaagaggaggtttacgaaaggttctagaacatcagcgcggatgtgggtgggatcgacttatcagtcagtgacatgtgggtccggtttgcatccaaggcccatccgtcagtgtgtattaggaggtaagcgaatcgacgcacggtacagtaatagcgcgggtaatttagtcgagtttaaccgtttaatccaaaacttgattggctgttagcctgtaacctgttaccgtagtaaaatgtgttcacgtacggaggaactcctttaggccttaggcccaagtcatgaccttcgtggatggcccaggaacagaactaaccggcccaccatgggatggcccatatataaatcggccctgagggctctcactcatcaaatatcatgttttcatatcgatttatatcggaaatggcaccgatcgagcgctcgatcagcggaagaaaaatcgggcgctcaccgcttcctgcgtcgtccccaccacacaccccaccacacgcgtcattacaacaaatcacccacatattacagaaacgctctattaatgaaattcgtttcattttttgttccgccaataatgtttcagtaagtgtacttgtgatgtttcactacgtatgaatgaaatgttgcagttaattgaaacatcctttcgttatttgctgaaacattgtttttatataaggtgaaatagcgtccggtttttttggaaaccgttgtttcatacgttgtagtaaaatgtttcacgagatgatttggttgtgtttcagctttttaaaatattaaaaaatgaacattttttatctacttagtgaaataatttcgatctacttggtgaaacaacgcacaatttatatatatatataaaaaaaaatcggacgcccgatttatattatgtagacatcacatgtatatgtatttatgattcggaaaacattgtaacagtatgcgtctgcatactctgaaagttgtatgtccaaaattgatccgcacatcaataataccttctgctttctcattgtgcagatgagtttaaaattgaaaatttgtaaaccagtacaggtcactgcactcgatgttggagtactgaattttcaaagcaaggcaccggtctctgccggcacgtacgtactcgacaacggctcacggactctgaatctcctgatacacaggcgacacggtaacaactacagtaacaaccagcaacagccacatgtattgatgttaccgtctctcccggtcagccgcgcgatgcacaattcaaccttgattttcttattactcagcggcgggccagcgcggcggcggagaggagcacaaggaggaggagcacggccatggcggcgaaggagccgatcagggggcctgagatgcgctcgcagaacgagtcgaactgctggcagacggcgaaccagttggccctcacgttgcccttgtgcgccaggtacacgatcgccgccgacgccgacgcgaccgccgccaccagcgccagcattaccttttgcacgatcacgagagcccccccagattagccaaaattcagtaatattttacgttttgatcgatcgatttataccgagtcaaggaagatcaacaccagcctactgtaacttgccctgctcctgatgatgtgcacgacggacagcgggatggacagcaccaggtacgcagtaacagccgaattcgccaccacgaacaacctggtgacaacaggaaggaataaacgagcttgcaaacggaagtaatgcagattgacgattgtagctagaaggcaagaatggtcgcacgttaaggtcgggaggtcactgtactgcgccttgaaccggaggaactgcgtgaagaacgggagcgtctggttggtggtgcccatggcgatggcgctgtcgacgatggcgacgaccgccacgacgcggaggatgaggtcggccacggacagcgctctgctcgccgctccgccgcggctgctgccgctcaccacggtgcgggccgccgttctcgaagcctcgccgtcgccgtgctcggtcgacgtcgtcactgcggcttttccttccattggtgacgcttaattagttcaagcgaaggtgaaggatgcagactcgctgttcttgatgaagcaggatatacgacgtgttcgtgttggcgtgttggtgttgcaagcttgtgtggctgtgtgccaaagtgtaatattctagtattacgaatctgaatatatatatatatatatatatatatatatatatatatatatatatatatatatatatatatatatatatatatatatatatcatattagaatataatatatacggttttaaatttgtattttataggacggagatagtatacaggaagggacagggccgaggcacccatgaaactagcgcgtgtggggttaggtgattgtgacgtgagtaatacatggcatgatgcgtgccccgcgctcaccggccggtgcatggtgtttggttggtaccaactgtcgcttgctccatcgacataaacagcatcagctagacttgttctatgttcagtactccgtactgctaattggacctttttccaatgtgtgaaagtatcacttggagcttgcgtccttgtgtttatcacttatcagcttgcaaaaatgggctgccgagcttagtgctatgcctgtagtttgtgaagtgggttgaaacatctccacaagtgatgaaagaattatttttaaatagttcaacataagtttgttttttttctagaacacatatatttttatcaaaatatattcatgtgagatcttgttataaattatagattggatatatattttagaataaaattatgtttaaagtttgattaagagagacagagtaatgatgcctcacgtcatcttggcaaccaggtctactcctgcatgcatgcatgcatgcgacaacctcgctccttcaacgtgtccctgcatacaaacgaggagcagcgtctttaaaaaaatattgaacgtacgattggtaggctccgatatttgaaaaaatattgaacgtacgatttgtagcgtccgatttaaaaatatttcaacataattaagtatttgtgcaaaaatattttatttttcatatgattttttttatgtttcactcattggtatttaacgttttgtgtagtggttgtgattgtttcagttagtaaattgttgtatttctctaaatttgaaacaattcacgaggtgagttgtaatatttgtgtacatgtgatgaaacagttttctatcaatggtgagacaagttattttttgagacacatgtatatttttatcaaaatataaccatgtgagatcttgttataaagatttaatgatgatgaatctaatggtatcattgaaatttagatcagaatatataattttggagaaaaaaatatttaaaatttgaggaaaaaattaggcacatgtaataatagaagggagagggagggagcgtatgcaagcagcagcgcaagcaacacatacaggggaggcaagcaacgtggcacgtgaacaatgcagcatgggcggcctacatgcatgcgtatgcgcgcggcagtgcgggggtgagcgttgaccagcaagtgaaacattatgttatatatggtgaaacaaaaaaaatcaacaaccgaaacatttaagtattttatgaaacatggtgaaaatacacgttgaaacatgtcgctggcacatatgaaacaacaagtattaacgaattgaaacatatatttttcttttatcaaaataaaatcatgtgatattttattgtaaagatttaattagaacaaatataatggtgtgatcggatcataaattggataagtaatttaagagaaaaattattttgaagcttgctaaaatacatacatgtgtgcatggatgaggtggagagagaggagagagagtagtagcagttagtttcatgaattttgtgaaacacaccgatgacacatattgaaacatatcactatcacgtacgaaacattttgttttaacgttttgaaatacatgtttttcttttgacataatataatcatgtgatatctcattgtaaagatttaattgcaacgaatagaacggtgtgatcggatcgtaaattggataagtaatttaggataaaaaatatctaaagagaggagaaaagaatgaaaagaagcagttagacacatacgttacagtgacagggttcgttctcacatgcctgcatgggcgtccgatttttggtgagatgccggacgccaagccgtagcgccctccaagaaatggcggacggatgcacgtaacgggccacgagcccacgggtcaacctaatcccatccggcccaaacatgaccttgaccgggcaaggcctagcaacgctcaagcccgcttcaaccaagcccaaaattcttgtgcttttcgtctgcccaagatcagacaatggttggccacccaaaagtctgaccttatccactaaaattttccatacagattacaggttacaggtttcacccctgagccaaacgtgagcccgctacactgacaacaacaagctcatcgccaacccgctactgaagcagcagcctaccagcaatggcgttgccgctgctcaagtcgtccccccacttctctgctcttcactccgcgaacagagcccagctccatggccgctgccgtgcaacggtaccgcaccgtccattctccccttcgcgttcatgcaaaaactgctttcctgaattccttgcgaatttcacctacttgttcaaatgttgttgttaaatttgcagctcggtggattccatgacccgaggtccaactccagccgttgcaaggtgaaaggtcccagtgcattttaattttttcaccgagaaagaagaaatccgtggtgattggtgaggcaaagtaatgcggtcttagcgtttgcagaaatcggccgggaggggttcagtgaaggcgaacgcgtccccgttggacgtggtgacgctgatggtgacgatggtggagcacgtcgacctgcagagggactacgtcgtgcacaagtcgatctggcatctcagcgacgccgccctcaagagcgtctgtgagtcgtcgtcgtcgtttcacctttcctgcagtttgttgttacgtctgaaactgaaacttttcacaaaaaaatttctctgtctgtctcgtagataccttctacgccttcttcacagtctggggcatctgcttctttgcgtccatgaaggcaagcacgcagaacatatgccactacaacttggaacgaaattacatcttcgatatgtgttactgacacggtcttgtgtgaatttacaggatcctttctacgacagtgaggcgtacaggggacaagggggtgacggcaccgtgcactggtactatgaccgggtatgtctttcattacggctttttttttttcctttatcacgaagaaagaacattcagacaattagacaaactctagttgtgcgaagctactaagataaccagtcattttgctgatcgatctccactctcccatggttgattctgcagcaagaggacctggaggcgtctgcaagagaggagctcctgagggaggagctactcgaggagatcgagcagagggtcggagggctcagagaactcgaggaagcagccaaggaggagcagcttacaaactgatggatgaatgagagattgcgcatggatggatgactgcatgatcatggcgcgatgcggctgcattctgtaataccgtacagagcggctgtgtaatagcaagatacacagttgcctgatagcgcctgtaaatgttggcatcagactcaaaaggaaagcaaataggtgctccgtctgcatgaatgcattatattgcatttgtagtgtaggctaaaagaaggaatgtactactccatgttaatcaaagaacctgtaccgttcaccatggtggatattgcttccaaaatatataaattgtgtaaatcgactgatatagacctacaccatggtggatatacgtgccctgtggagacggaagttttgtcagatcgcaaccaaattgtggcgatccaatatgctttcgttctgtcggctctcacggtgtcgggccaactttatttgggtccagtacagaatggtagcgattatgggctacctttaccgggccgctcggtgatggactggcccaaaaaactccgttagttcggcctgcttgcgctggtggtcgcgcgctgggaattggacgccatcgtcggccacggccattcgatcgaggaagaagaaccgctgatcatacttgagctgctccactacaggccgcgaaccagcagcaatcagtctgcactcaacgtacagtacagaccacactaccacagtaggtagcacatgtatatactacttgtatagggtgcagaacttcgtagtattccgtcgatcagctcatcagtcatcagagactaacaatagttatttcgacacaggtctctcgacaggcttgaatcggctgggccatggctgatgcaagcgatcgtgatcggctcgctcccgacatgtgcgggtgaggtcgcggcgagccggagtagggctgcaggagcagcagatgggcatgcgtacggcgcgaacagaccggccagcagcagcggcgtgatcgagactgaaacgatcaggcgatgtactgtgctagtacactggtcgctgcgcaaagctgcaaggagtaggactagctgctgatcccacacaggatactggtatgatcgcctactgtgtactggttggtgtctttgtgataacacagatgaacgcagatcggcagatgcataaacatgtagtaggagtacttcattatttggactctgaaagaaaagatgtagtaggagtacttcattatttagtaggagtatgcatttacgacgtccttgtcatggttctggccgtgttcattcctttaacttcagagaacaacttctttgttttcaattaggacgttttttaagctgttaaatgatattttttaaaaaatatataaaaaaatttctttgaaaaatcagataaacttattttaaagtttataataattgatactgaattatttatgtgcattattgcttatctcatttttacatgccgctgaaaaagataaatcaaattagagattcaaacatgctggccctaataagtcactaaacgtgccttatagtcagttacttcagtgtattaactgaacgtacaccattcaatacattaacttgctatcacttgtttccacatttttcacttgttaattgatgcaaaacgtttgtactcaatgttttaaagttatcagattaatttgttatcaacatactccttttatactttgaacttatgatttcctgtggatacaaataggtgccattaaagtttcaatactatgatgtttattcagtatttattaactaaaatgtttcactagatatttgtccaatatgaaagcctatatccctgaaaagaaaaataggaattttacagttttttaggaggtactataagataacaaaaaattagtgtaaaatttgatatctcataatacataggtaataagaggtatcaaatttataatagaaaaagtggtatctcatgataccttgtcaagaactgtaaaattactcaaaagaaaaaatacatatatatgacagcagatgggaccgagtggagtagtaattagtcttgtatttctatcgtcctagttcagtgtagtttatgtagttagttcatgcatattattgtacccctttttttagttgtgtacactatgcaaaagttacttaataatcggttcaaaactgaactaatactatgtgctagacacgaaatggacaatgcagcaatctaaacatttgtgatacgaagatcggcgacgtacgtgaagcataggacacaagttagaaatctgcaatcgatcagtccttctcgatcgacaaccccctcccctcaaagaatgaaagtgcaattgcattgaaccagacatggaactatggaagaactagcttagctagctagtgtacgagaaattaagagagagatcaccgaacaagtagtgccctcgatcagcaccgacatcatatcctatcgctgcatctgatcctgcactcatgcatgtgtatcatcttgaggtctagcatgagaagacgaggttgtaatgtagccaaagaaaataacttgccggtccatgcatcgatcgatcacacacggcaatacagcatatgctggattgctgatgaacacaaaccaggccggcaagtcatccttggctacacaaccagcaatacacctcgtctccacatgcaagacctgagatgagcgtacgtaccactgcggcctaggaatcatcggtggatgccgtactagctccattgctgcagaccaccagcagcagtagaagtccagcacgtacgggaagagtcgacctagtaggaagacaagctctctctcattcaccgggcaatgtctgaagaagctcaaatgctcgctgaatgcaacgcgagcttcgaatcgatggagactgtatttatatgccgttagtacagggcacggggcagatcagtccaaccgcgcatcgatcaccgtatgttcctcgtcactttgaatctgtggcagtgtttagatttaggggtgaaaatttttacaatgttttatcagatatacggatacacatttaaagtattaaatatggtctaataacaaaacaaattacagattccgcctgtaaactgcgagacgaatttattaagcctaattaattctttattagcaaatgtttactgcagcccaacattgtcaaattatggagtaattaggcttaaaagattcatctcacaatttacaagcaatttgtataacattttttttctatatttaataatttatacatgtgtccaaatattcaatataacagggtgaaaaaacttgcaagggatctaaacaagccctgagttgttgtgtgtgacgatcgactgtgtgtgcagggggtgaggttggtgggtgtctataataaaggagaaaagatgtgcctttaattatgtgaacgagtgatcgacgattcgatggatcgcaggtttagcgtacagtacgttcgatcgccgcagcgcgacacgcaccgcacggccccctggcctgcatggatttgacgccgcggcacgctgacaggtctagtacacctactgtacgtaggagagtgagatctctgcacacacacaccgctgctccatttgcctatgggctatggcgtctagctttgcatgggcgcatgggtaggccgcttttgaggctcgctcgggtcgcgcatgtgaaccgccgcggccgcgccgtgcgcttgcatcgcgcgcacgtcgtagctggctggctcgtttagtcgtgtgtgccccgccgtggatgcagcccggatttcggtgaaatgatgtgccggagattcttcacaacgttacgatccatcgcccatgctttggtagcctggtagggagtagtatttcgtagtacaatgctactgttaggcacttatgttaatgcggtttgctagctagtatattatgtgtaccacttgagagctagcttaggagcacaatttgtgaaccttgacaccatatgcatggggaatataatgaataaatgtacagggacaatgattgtgatttgtgaagatcccatgtgttagtaccagtaccagaataccagtacagtgacactgtactactctgccgtaaaagacggagtaccaacgtaaatgctgaaccgtacttgcactggccaagaatctgcccgatgatatgatactgtacgcgcgtatagaacagctactactagtatcactctatcactattttttcacagtactaacagccgccaaatggcattgtgaagacgaagcccacccaaatgaaagggagagagagacggtactcttctcttgcaattccgacacgtatcacgtctcggtcagctggcaggcagcctatgatcgaatcatgtatagtacgtacctagttgtgcagctcctgtctaaacctacggcgccttttgcgtctccagcttcttttcctgtcaggtttgatgaaacggtacaagcagacgacagtgaagcagctgcagtagcggaggaggcagactgcagatggggccaagctccggcggtccagccggacagccgggcaaaggctgggagagcaggctcatcgctgatgtgctcttcccgtcatccgaatattttttttcttcacttctgcagatccagagtagaatcctaaaccatctctttaagttcacacacgacatgtgtttgttcggtagtttcagtcgaacatgtgtttaaggaggacactactacataaaaggggtaggtgtcggttcgaaaccggttataagtgccagatttcgcaatcggtatccagcgtgcaacacctcgatttaagaaccgacacatttgaagtttcaggaaagcaaaaaataaaaaagtcggttcgatcaatccgatgcattgagcagttccccttcgccccgatcagattccataaatatcaatcggcattcaagaacatccaagaatacatgaacaaacccaacactaaaaacatccaaaaacactaaaagaacctaacagagcctccttcttggccactacctcgcctctacgttggccttctccaccaccaccgctgctatcaccggatggagaggaggggcaagcctctttctccatcattaccgcctgcggggagctgccgacgctatgttcgcagctgaatccgcctatctacgcagacgaaccttggtcactatcggatccacccaaccgccggcaccactccgtctcctccatgggcaccacccatagtaacacctcgcgcgcggtggcctcggtgcctcacactgccttggggcagatctatgcaggccacgacaccctagtgagagagagagagggagagagagagaggaggggaggcgagtggagtggataatgacgaccactccgcccctccctctccttatccactcgtgatggcttggccagcaggatagagaggttgttcgagtgtttttttttcttctctcaaacttactataattgaacttggagggttatttggccattctcttggagatgctcttagaaactcattatttgcctactcttgcgcgagttagtttacccctacttggagaaagtaccgctacagtaaataaaacaagggatatataatagagcaaaatttagaaaccgaactaatacgtaggaactgtcactttgctacaattttcaatgtaatctcataaaaatgcatcatttgctaatgatttttgtcaaagaaatgcaaagtttgtcaacttctacctgccaggcgcatatgtaatacttgcattgttgcaaattggtaattgggtagtccacttgtcaaacacacctagagggtaaaagctgcagatttgttattagatagtacctattgttatggcggccttatgaaatgtctaattgaagtaaagtgagtaatagttttgacaaaaatatttgtagtttaatttactcaatgtaatgctataacagcacgtgcaaaagatttgtataatcctagttaagcagataaccaacatgatcacacgaaccaaacttgcacagcatgacctggtccgtcggagcaaaatgctgcagatactgaaccttgatggcacctgagaaattgccaggtaggtgaatctccgtcgacaaaacgtcaaacatgcaggagaaaaccaccttcttccagttggcacacctgctttggtcaacgtacgtttatcaatccggccgaagaaaaactacagaaaaatcgtccaaggctgtgttttagttctattcaaactttcaactttttcgtcacgtcaaatgtttagacacatgcatagagcattaaatatggacagaataaaaaccaattgcacaatttgcatgtaaattgcgagacgaatcttttgagcctaatttgcatttgctaatgatggattaattaggcttaatagattcgtctcgctgtttacaggcggaatatgtaatttgttttgttttagtctacgtttaatagttcaaatgtgagtccgtatacatcaattttttttcccaaaacaactaaacacggcccgaatagcaatccgcgtgtttttttggccttttgcccctaacaaaattgtgtttgcagtttgcacatagagatgcagagacatagagagaatagaataatcaaactctgtgttctattgttcagggtgcccagctccaggagaggcagacagagaagcaaactattccgtgttctccattactcagatcggaagaagtgggcgcggcgatttttctggtcaaaatttgcttacacacgaagaaagcccacacacgttgatccgttgatgggcctatccttctcctacatatatatgggctttgattccgccaatcccaagtaaacccgaaaatacgccttcgacagcagctgacgtattcctcgcttccgaaagtgcaatttccaaccgaagcgagaggccaccacaaagacgaggcccccgtcctccgccgctcgtcgacggcatgcagcagcagggcgccgccgcgctcacgccggcgaccggcctcgggagccggccatccctcaccgtcaaaaccagccgcgtgtgcaccaccgctgctctccctcccctctgccgctgtggccggcgccacctcatcggctccacctcggccaccgctctcctccccctgctcgccctcccgtcgcccgccgcctcgcccgtcgaccccgaagtaagcttcttgccggccctggccctgatgaggccctccatgtttggtggcttcatggccatcttctgagctgcccgtacttgggtttttggttgttgtgcaggtgatgcttgagcgggtgcaccctgccaggccggagtggtacgagaagttctatgccacggccatggacaagttcatgaaaccttacgaggctgaggtatttttgcttttcccctagtttcagactttcagttccactactctgccattctgaaacttgtggtttgctagtagatttttgtctatacgaacaactgtattggtgctcagtgctcactcaactcagtttgcccaattcgacatcagagttaatttttttccatacatgacatgttgaccatttcgatcacatatctgttaatctgtataagctctaacgtttgattttcagaactcggtaatttgtcttagtatctgaatttttttccatagatatcactatatcagaattcacaagtaagcacctagagtgtctgcgagtagcagacatgatcttaaatcttcatcagtaattttagcttccctgttaaaaaaagttatcactgttttttttctcagggattgtgatgtgattttgatcatctgccgtgatcatgctgatcttatcacaataatgagttttgcagattgcacagtataaatcaaagctcttttcccaattgatgactgctgggaagaacattcttgaacttggtgttggaacaggccctaatctcaagtactatgcaaatgccgatggcgttaacatagttggggtggatcctaataaacacatggaggagtatgccagagcagctgcagtgtctgctggacttccaccttcgaacttcaccttcagaagaggggtatggtgccttctggtagcgcactatttctctttttagttctgtgaactatctttgatgcgtaattgtatttaggttggtgaagctttgccagctgaggacaattcaatggatgctgttgttggcactctggtaatgtgttctgtaagtgacgttgaaatggcattgagaggtaagagttgtttcttttctaacaacagtatttcttatctgagtacaaatgctctttataatttctgcaaagctttgcaacatatggaatctttagatatgtccatgaggcaagatgtttaaaatattccataaaattattatcaagaatattttaattttactattgtttcttagctacctgaaattgtcactgattttctatccaaaaaaataaatgcactcactgtcactgggcttgaaatatgcacattattgaacaaggtaatatgatgtgtcggatacttttacacttcatactcttcgtcttgtgttttcccaattataagaaattggcgttacctagaactcgagccatccaatgctaagaaaggtttaaactgaagtttaccgttttgtgttaaactcttcaccgtaaatgtaaactatttccattatctgaaaaagaagtgaaactcttcatccccttttacataactgaagtatgacatctgttcttgtctgtatatttccacaatatttttgcatctcttgaattttggcataatcatttttgccttgcatagacaacaaacttcatctatattaaattataataatcattttctagctaaacaactcagagcctttaattgtacagaaataaaacgagtcctgaagcctggtggtctctacatattcattgagcatgttgctgcgcctggtaccacctgctattctctttcacattttacacacaaatggcttaagaccatttctgtttagagattttctgttgttgtgcattattgactctccttctccttttgccccgtgcaatagatggatccttcctccgattcgtgcaaggtgcccttaatcctctgcagcagtttgtctctgacgggtgccacctcaccagagaaacaggcgaaatcatcagggatgctgggttctcgagcttggacctgaacacgactcgcttgtctactgcatttatcctcagcccccatgtttatggagtagcatgtaaatgatatttcctctcctttcgttgttccatctaattgtgtaaattgttatttgtcagcaatatgagctacagtatcacgctaggtttccaaggctgaatattccatgccacacgttagatgggctggtcttcagaaatggctggatgcctcgaagatattaaatgggccttttctgttaacatttcgttgctgttgggctgggcccgtgtcctgtctgctgatttcttgcagcttggaactcttcaaattgtcgattgtgaaccataagagcaggtacaacaatgggctaatagcctgcttacatataggatttttgtatacgtggccaagaaagaaaacttggagagagaaaagtgagcaactatttagtcgccggctttttgcgcgagcctctacatttcacttaccatgggcccatttgctctcacaacaaccaatggaaaaataaatggggacgtaaaatactgggcaagttccttcggagtaggcactagctcgattaaaaaaaataaagaagtgttgttgttgtatgcattgtagattagttgtctattagaggacgtggcactcggttgccgccaacagtcgccgaaactattaaccttgggcatggtttagttcctaacattttcttcaaacttcaaacttttccatcacatcaagatttttctacacacataaacttttaacttttccgtcatatcatctaatttcaatcaaacttctaattttggcgtgaaccgaacacaccaaaccattgctctagaacttggggtgcaaaagtagtagtagtcctgcgtgcatgtgcgacgtgttcaccaccagcccacagcattcattccagttcagttaggttagttactccaccgtggggcacgtggcaagtgtaggtgaccaccgtggggcacgcggcgaggggaccccgtgtcacgcacggcacaggacacttgcacgttcccctgcttcgcccgcgcgacacatggcgcggccgccgggccgcgtccctttgcagcagcgcgctggcgctgcgcctcgcatgtgcccgccccgaggatacgcgccaagtgtgagcaacgatggtttggctcgtagtacgccgtgcattcactacgcctgtgccggtgctgggggccagtcacgggtccccctcccgtttctgccaaagggcccgtcatcccgtttctgcggcaccctttactgcttccccttgcgaaaatttgtaaaatctgtagtactattcccgttccaaacaaggcatgggcatgaagaggtagagattgatgtgaagtagaccttcaaattattcgtcgtttgtttagttgtttttttatcatttcgtggcacgggcgacgcatttccgttggcaaaacaactgggtagtgatccccgtaatctgggtttggtgggcatgttgaattcttctggactcctggtccagtgttttcgccgtcggaacctgtgtgcgttggacaaatgatcttttgcgcagatgctggcatgcacgttgtcgcggtcagcatgtgctccttccgtcctttgttgctgttgcagcttgcagcgtcagggcctgacacgttatcagaagacgcgggccagtgacatggcaattttggctgtttttagttacttccaaagttaataagttttggttaaaattggtacaatgtaactgaaaagttgtgtgtgtataataggttgatgtgatggaaaaagttagaagtttgaatctaaacacagcctttgttacttctgctaccaatatcagtgacagtgatgcaatttaaaaccagtcctaacgaacgtagccttaaacccctatagatatttttgcatttcaaccccttctgttttctactatatatacatatagtggtataaaattttacactcaacaccctaaaatctataaataatataaaatcacgccctatcctcacctgatcttttcacttcttgccattgcatccagctagcggcgatgatggcaccatttctcccctcctccatccaccggtgtcgacgccacattatccctccctcctactgtcggtgccttcctccctccactagcttccaactccagttgtcgccgttccttgtcgcctatgcaagctatccaatacgaggaagcctccttattcttcagcggtgtagatcgagggggcgacggtggatatggagcttgcggcgataaacatgttgcccaacggtgatggaacatggagctcggcggtgatggcatcgtcgtctgcgacacttcactacgtcattcctctctctctctctatctctcttacgtgtgtttgtgttttttttctacttactctcatgctttctctgacaatgctactcattcctcatagcggtaatcattatttctaggaccacgctagttgcctacgtggaggggaatctcctaggtgactagtcgggggttgaatgccacatagacgcactgtgaatggtcttatagtcttttcgaaaggaaggaaatgccgtaggaatcgggatcctacggatgatagcgtagttgccgcttattagaacaactatagtatgcaaccaaagatggtacctgtggtgagcttgacaacgataatttcaattcctcgtattctagccacggcaaagggacactttgtaaagggcatggatgacaggaagtgagaatgtacattgggtgaaaatcttgtcctagttttgattggtgtcgacgatagatgttggtgcatatgaacgtcgtcttctccctttttattcgggtgaaaacctagtcctggtgttcggagcaagagttgacaaatgtcctctctagaagtttcatttaggacgtgtttagttccaaaataattcttcaaatttccaacttttccatcacatcaaaactttcctacacacataaacttctaactttcacgctaaaattggatgtttggttgaaattagaacgatatgacggaaaagttagaagtttatgtgtgtagaaaaatattgatgtgatggaaaaattaaaagtttgaagaaaaagtttagaactaaattcggccttagaaggtactccctccgccccaaaaaaagacaaaccctgggtttccgtgtccaactttaattgtccgtcttatatgatttttttttataattcgtatttttattgttgttagatgataaaacatgattaatattttatacgtgacttgtctttttaatttttttcataatttttttaaataagacggagggtcaaacgttggacacggaaaccagggtttgtttttttttttagacgaaggggagtagcgctttgggtggttgctgattttttttttcggttgttgaccgtggagggtgtggatcaacgtaggaaagtcggtgttgcttggtctttgactttaaaacatggcaacaatgactcgtgatgtgtctcaattttcttgggtcatcagttgcggtggcttgccgcctcgaagtgtgttctcgccgtggaggttttcggcgattactcaccaattaacttcacagttgcatgactgcagggcaagtttttccttaataaaattggtcagtttttttcttccgtgacgatagaggatgtaactctatgccaattttttagaggttttctttaaaaaataaatcaatgctcgtaccattgattcataggaacgaggaaaaggaaaaatgtggaaatttttctactctatagttctagagaaaaaaaaaccaaagcttattgctttggcagctcgtgtatgattgagacataactactcatgcccctttgaatcgcagaatgaaacaaaaggaataataagaaaatcacataattctgacctgaacaaggaatgaaaaaatatatgaaaacagaaaatgtgagtttaagtggaacatatgaaaaacactggaatcgaacgagattggacatgaaaaataaataatgttatgtgaatagcatgctagcgagagggcacgaaagaccacacagagggttgcacctaatgtattgttaggaatgaagggaatgagtgagcacccagtggtgttgcatcgtctgtaaggtggtctggtggagataggctccgtgtggtggtcagggtttaccgaactatttagggtgggattatcaccaccctgtggtttagtaaaaccgaaaatgttatcatacgttataaccgcacgatttggtaaactctggtggtgtaggtggttggtggttgtttttgtttttgtaaaaatggcttatagataaatgactacatataaactacgaaggacatttattatcacattgttgcaaatctgattgattttttttgggtgaaaatatgtagacaagctctcctgttttataattaagagtaaattgcgcccgtagtacaacaacttggcaagtttgtgcgatatagtgcaagaacttaagaattaaacgtccaaatataacaacttgataagtgtgtgcgttctagtacaagaacttgataatttagtatttttatgcatcaactttgctaagtatatgctaggtgaattttttccacgttgtcaatatgccattacatagtaatcctacggatattaccttataatattgaacttaatctttaagaattatactgcacatacaatttacatccaattaccttttaagactttttttcttgaccttctcaaatatcaaccggaatataataatttctatatcctgtttaattgactttcagttattagttattaggataaaaatataaatatgcttatacaaatacacgttagtatactgtcaaaataagtacttaaaaattgaatctatataaaaaaatactattaagttgccgcataacctcttaatttattgtatcaaaatcatatataccttgtaagttgttgcatttatatgatcttataagttcttatattaaattgcacataccagccaagttgttgcactcgaccgctcatttctcaagttcttacaccaaattgcacccacctaacaagttaatctaccgtgggtgcaatttactctataattaatatatttacatttacatagtatgtagacatatactccctctggttctatattaattgacgttttggacaaggttaagattaaacttttataactttaaccatcaataactttaaaaatatttaatttaaagaaactagaaaaacatatatagatttgtctttcaaaacactataataaaagtaaacatgcatttatttattgtatatattataatagaaaaataaggttaaatatatattttatagagcgtgtcattgttcaaagcgtcaattaaaataaaaccgcagcgagtaccacttattgagcaaacagttacaactacataataggctccaccatcttacgaaatgaatattgccttcctactttcctctacttgtgattttttttttatcgggggagggagaaatttaagacggaaccaaccgatctacagagtggttacacaattgtgggcaagcaagcagcggagcagcccacggtctctcggccttttttggattcttccgctctgacgagtgaaagagcacatgacttgtttgctggattcacagtggttcagccagaacttcccttcagcattgaaggcacctgaaacggaatgctctcatggaaatactacccacgtattttgactacgcccttgtatagttacaattttttttttcaaactttcaattttttcatcacattaaaactgttcttacacacataaactttcaactttttcatcacatcgttctaatttcaaccaaacttttaattttaacgtgaactaaacacacctagtattagattggttttttatgggacggatagagtatttacatattatgctactctactcacagttatcactactatgccgctatggctgtacgcctttatatttggggtgtgtttagttcatgttacaattgtaagtttgattgaaattgaaatgatgtgacggaaaagttggaagtttgtgtgtagaaaaatttttgatatgatataaaagttggaagtttgaaaaaaaaagatgggaactaaaccaggccttgggtttgttcaaacccaagggttcccaacctctcaccgtcatattccacgcgcacgctttttaaactgctaaaatgtacgttttttaaaaaagtttatatataaaagttattttaaaaaaatcatattgatctatttttaaaaaaaatagttaatatttaattaatcacgtgttaatgatctgctccgtttttcgtgttgggtgagcagcaagcacacccatttggcccattagccaattggcccatgaatgaattggacttcatgtcttcgtgaaccggtagaggtggaagtagagtggagtacattaatgattaaatatggatactttctaccggaagcattaaataagcctgccacacagttactgcgaatattattaggtgttgttttgattcagatacttaattttagtctatacatttagatactaatttaaagtattaaatataaactagttataaaactaattatataaataaaaactaatttgcgagacaaaatttttaagcctaattaatccataattagagaatatttaccgtaacatcatataggctaattatagattaattaggctcaatagattcgtctcgtgaattagtataagattatggatgtgttttattaattgtctatgtttaatatttataattagtgtccaaatatcttatgtgatagagacttgaaaattttagtctcatctaaatagggtcttacgctgtaaaaagaatgaactgattttaatttttactcatggtcacattatatttttacgtaatacttcctccatccacaaaagttacttagttttatcacaaagattaagaagaaattaaatcgtcttggatgatacaaaatccaaccaataagtatttagatgactccttggttctaatcaaatgtttaatttatctcttcatttaatttaagtcttcaatgcataaagactaaaataggaacaacttatttagaaaaacttaaatataaaatatgtgtaacttttgtggatggagggagtatttgaaaataaaggtgaatgagtactctctccgtctaaaaaataaactcaacctcgtaagggtgtgtttagttcacgcgaaaattagaagtttggttaaaattggaacgatgtgacggaaaagttgaaattttatgtgtgtagaaaagttttgatgtgatgaaaaagttaaaagtttcaaattttttttgaaagttgagtatttttttttaacggagggaataatgttgtgcagtaaaacccgtcagactgctgtgtggactgttgtcccgtggttcagtcaaagatgccatttataaacccttgccttaaaatatggagggatgtgtagctcagctcctggagctgacaactccgttagaatagtgcaggtatgtgaagaagacttgtatggccaaacgtaagggttagggtatgtactcctgagggttagagtaaagatggaagctttgccgtgacaacatttgcggaatgtatcaccgcgttaggttttgaagctgggaggggcggagggcagcgattttggttggtagtagtacgggacggcggcgaaaaaaaagaaagcaaaagcagtgctcccgctcgccgcgctcggtttcgacttccaaaggcaccgccgcggcggcagcttccccgtctttattaccccaccacgccatcccttttttttcacactcccgccacgcctcccaacgcccccgaaatctcgtgtccctacgtgccggagcagctgcgagcttttgcacccacgctgtgagccccacccgcgtacgccgcggcctacgccgcactccactccaccccaccctactgcgccgcgccgtttcaaacccgttcctttcgtttcaccgttcccaccacgcacccctctatttatccccgcccccaacaacctcgctgcactccacactccacgcctccgcccgctctcgtcgcagcgcaccccgtcgcgtgcgacgactccatccccgtcacaacaatgtcgtcccgccgagacgtcctcgctgttgtcctcgtggccgcgctgctcccgccggcgttgtcccgtgggctttggctggggcaccacgggctggggcacgggcacgggcgatggcgcgcgccgcatgtcggcggacacggccagggacaggggccgcagcagcacgcgccgctcggcggcggcgggtggtcgtcggcgcacgccacgttctacggcgggggtgacgcgtcgggcaccatgggtacgtttttttctcgctgtgcactgtgctgaaatgttgttacatctgcgtgttgtgctcactgttttgcgtgtgcgtttttggtcgcgtgcaggaggggcgtgcgggtacgggaacctctacagccaggggtacgggacgaacacggcggcgctgagcacggcgctgttcaacaacggcctcagctgcggcgcgtgcttcgaggtgcgctgcgacgccggcggcggcgggagccactcgtgcctgcccggctcggtcgtcgtcacggccaccaacttctgcccgccgaacaacgcgctcccgtccgacgacggcggctggtgcaaccctccgcgcgcgcacttcgacatgtcccagcccgtcttccagcgcatcgctctcttcaaggccggcattgtccccgtctcctaccgccggtgagtagccaacgccggcaatttcttgccttcgcgtttcgctttcttggatctaccggaacttactgaccatggcgtgcgtgctctcgagtgcagggtggcttgccagaagaagggcgggatccggttcaccatcaacgggcactcctacttcaacctggtgctggtgaccaacgtgggcggcgccggcgacgtgcacgcggtggccgtgaagtcggagcgctcggcggcgtggcaggccctgtcgcgcaactggggccagaactggcagagcgccgcgctcctcgacggtcaggcgctctccttccgcgtcaccaccggcgacggccgctccgtcgtctccaacaacgccgtcccccgtggctggtccttcggccagaccttcagcggggcccagttcaactgattccgctcaattttactcgagcatcgtcgtggtagttgcagtagtactcccaactggaccgtgctgggaagtgccattgttttatgattggtactcagtctcgccttggttcttgggaaagtatttagtgggtagtttggcctagtatcaacatgggctttgtgctggtgtcactgctagtggtagtttgttacaagtaccattagttgagcttttgtggtatcttttggctagggattggaagtggtggtaaggctgtggcttgattgacagaggccgccttgtatcacccgccaaaatagcaaaattgggcctaatgggaatggccttctgctagtaatggttttgcctggttgttgtctgtaccggaccccagtaccggacctcattttgggggtgccaaacagtttaggcatctggggtatgccctgtgtgctgcttatgaacaatttctttttactcgtgcttctcttatgcgggagtattaatgcatttgaattcaatccaccgtatcacaatctgaaacaatctgaaacaaatccaagaaaccgccgtacatgatttgcttgctgcgtcaacaaccgtgcaaatgagtgtgtcgagcctagtgtacatctgctcgtgcgaggcccattgcaccgtactgctcgttttcgctgtgcgcatcaatctcttgtgccgatcgtagtgcgcggtacggcgctgcgtggtcgttgcacacagactagacagcggcgtggcgcgcgtgaagggaaaacgaatgaccggattacgttcctgtgttcgctcggttagaccgccgagcaagagttctacgagagacgcgtcggtgtccaaagctgctcgacgcgcacaggcgccgcaggccggggacatgaacaacccggcgttggcggaagttttcaaccgagcgagagaaagaagtgcggtgacccaacgcaccgtcggcagcgagcaacgtcaaggctatgtacagtgttcaccggctcacggcgagtcggcgacaataggcagcatcgccggtcagtctgcgtgtcatgggctcaccgaatgtaggagttgttcgtgtggagcgacggcagcaacggggagacgactcacgacttcacgagtccgatcaccaacacattgccgttaaagccatgtgcagtcgccggcgtgtatgtgaaatgtcaataccaatctgtaaacaattggattttgggattggcaaaaacaattgtatccgcgcgtatgtatccacggtttggttgtatccgactccaaaccgtgtactactccagtccagtctccaggaaatcaggatatgaactgtagggcaagtacaaaagtagagaacggtaaagtctctacgttaattagaggctatcacgttacaatatttaagttacagtctctaatcattaatgtaccaaaatattttcttactagtcatctttcctttattagactcaatgcaataaaaaaatttcctaataaatgctaagagtcgactctacaccgttgtcatgcgtagcaaccatctttctctttccttcttcctctctcttccacgtcaccaaatatgcttgcatgatactccctccatctacttttgataatcatatttccaaatctgaaaattttatttttgataggcatatttcaatccaacaacctatcatcttaatgattttctcgaatttaatacgtgactctccattcttccacacatgattggctacatgggctttgagaaatgtaaatattaatgaatcgcttgtttacgaggaatgaatagtagcatgcttaaatgaatgataagtagaattacttatccttggtctgtgtgttaagatgaaatgtaactattaaaaaatagatggagggagtaataaagagagaccgctaataaaaaccactgtacatgccctaaagtagcatagtactactacgtattatatggagagcacctactgtttgatacacaattgtatccgcgcgtatgtaggctgctccattttagtcattggttgtatccggctcaaaccgtgtactaatccagtccagtctccaggaaatcaggatatgaactgtataaagtagcgtagtactactatgtatacggagagcacctactgtttgatacacatactagaactactcctacatacagaaggcatacagatccctatgggtgtgttcggtggtgggtgttgagaacctatcacccacgcacggaatacggaacggtctattagcgcgtgattaattaaatattagctaatttttttttcaaaaatagatcaatttgatttttttaagcaactttcgtatagaaaatttttacaaaaaacacaccgtttagtagtttgaaaagcgtgcgtccgaaaaaacgagggagaagggttgggaactggggttgcaaacacagccatagagattcctgcacggaccgtcaagcaatcaaacactccagccagtcatcaacttaccggtaaaactcgtgcctgcaaggttgcagagctcaagtagttgggctccagaaagtggaacactcggagcaatggtcaggaaacaaggaatctggttccgctcgatgcggatttctagaaccgtcattccaatctctgacccaatttttgaccagagaccgtcattgccagcgagctacccattggattctttgatgttgtcgagcagtagcactcaagtgtaagattaacgaggctgttagcgacaaagataagagactctgttttgagtagtacaggagtactactagtagagcatttgaatttaacgtgccatgcacaaaccaggccgatcaaaacttttgctaatcctgcaaggtcatcgatcagccaacctcaggcaacagcgaacaaactaggggtgtttgggagagagggctaaactaaaaacataaatctctagggtaggtaaggagggactagagtttagtccctctcacaaaaattttagtctcttctatagggacttatgtttttgtgagagagattaaagcttagtcactactttccaaacactatcttatgcttttgtgagagagactaaaagttacctagttccaaaacaccccctcagcatgttggacacataccgggcacaacagataacactgtcctgcagacaggtaaatcttttggcatctgcaggaggtttcgctgaggagataaccgacaacatatacaaggcatgggaaaaagatgctgcgattgttttgcttttgcatgcggcgtcttgaatcgattcacaaaagaggcaggaagacgccggtcaggcgcgccattgatgggctcttttttttcccttccccttgcttggtcgtactactagtagtagcggagaggagacatggcggtcacaaaggccacacgtcccggttactcggctcacacgaaagggatggtggtggtggcaagcaacgtgcgagtgtcggtggctcgtctcactgaacccagtatgcgagcctgcagccgcatggaggagatacggatggcgtggtgcacatgatgctacagctactgtgcattgaaatctttgcgatgtctctgcctcccacttgctgggtgtactgcgtcgccgtggactgtgagatggtggttagttggggtatgcctttgtgcctttactaatactacttgtacctttttacctttgtttttccgtgggtggtggtgttgatctgaattcttttggagggtaaaatgtacgcgcgacgttaacctgatactgtcagtgagcaattatacaggtgtgatctatagacactcttgattctgcccaattggatcaatattttttcttaagaatgtgtagttaagaagagagcagtactatactcaacagagggagtacagtgcgatgggctacggcattctccctccatcttaaaaaaaacttaatttctagagtttaaattttatcccataaaaaaccaacttctatcattctacctaatctcaaacgaaaagttttatccctttaatatcttttatctatctatcacccttactattttttttaataattaagggtattttagttattctcacactatactaattttatattgggatgttaggaatgggttttatttaagaggaagggagtacggagcatcagtaaagggcgacgaagagtacgccaaaagaccagaggaaattccgaagcgcacgttttccatggatcgagccagcgcgtcctcgtccggcacgggagccgagagggaggagtcgtcgtcgtctcgtcggactcgatctcgagcgctgcggcgacgtttcgtggccgtatcaactgatccgacggtcgcgtgttgccgttgccttgtggcttgtcggttccgtcggaagtccgaacacgatactcgcatcgcaccgtgctctgtgcctcgggttcaccgaggatagcggaaggttgggtccctattgggccataaggagacgggcctgtttgcatccaggttttaatccgatagaaataagttcatttaaggtcccttaacttgtcaacgaatccgattttcgttcctcaaccagaaaatatgatgggtccctcaactgtcaaaaccagtgcagatgaggtccctcggcggttttgacggcggttttggctgacgtatcgcctacgtggctaatttgacttggtcttcatctgatatggcattgacgtggcgcttacgtggcaattcgaccaaaaaaaaaaaacttcgtgggacccacatgtcagttttacacataaattaataaaaaatggtggggccccaccagtcattctcagcccccctttcttcctcctctctccccatctccctctcctcaactctctctcccctctccagtcccccatggcttctgagcgcccgctgccgccgccgacgtcgttgctgctcccgccgacgcagccggagtccgcccatccgcgccgactgcctcgttttctccctcgaggccaaccccttccgccgggagcccgacccatcggccgcgtcgcagcgggaggtggaggagtccaccatggcgcagacgttggtgggcacaagactagcgtcggcgtcagcctgcatcacctcgagcagcttcgccgggtcaaggccgtagtctgtctccgctccagtgggatcgactggatgttggctggatcgaatataacatgttcgtgtggctcaaacctcaaaggtcaagcacatgaaaaggcagcaagcatatctaatagtgatgtagtgatgctaaatgctacttctactcatagagcattttacgaagctgctcgaggtgatgcaggctgaagccgacgccggtctcgtgccgaacggatgtcgtccagccgtcgccatcctcgccgcagcggacgccgtgaacgacgacgtacttgcgctggtggtcttcaagtcgggggtgtccgacccggggggcctattggcgccgtggtcggaggatgccgaccgcgcctgcgcctggcccagggtgtcatgcgacgcgcggacggggcgcgtcgacgtggtcgcgctcccggccgtgggtttcttcggccgcctcccgcggtccgctctgctccgccgcccgtcggtcgtcgcgcccgagagagaagagagaggagagaggagagaggagagagacggacagaggggagattgggagtgaggaggaagaagaggggagtgagattgacaggtgggggccacgttggccccgccttttttaattattgttttttgtgtaacttacatgtgggcccgatgtttttatcattttcaaaactaaattgccacgtaagcatcacgttaatgccatgtgagacgaagaacgagtcaaattagccacgtatgcgccacgtcagcgaaaaccaccatccaaaccgccttgggacttattttgcaccggttttgacaattaagggacctgttgtatctggttttccggttgaaggacgaaaatcgaattcgttgacaaattaagggacctaacttgaacttattccaatccgatatatatggcccatcaaatctccaatagcccaatgcaaagccatcagaacgcctgagttttggcccaagagccaactgctccaccgtctcggctcttcttgatggctacaccctacaagtacagtttggccgcggcggcggcggcggtggccatcaccggcgactcgatcgtctctgcggcgtgctcaactcgattcctctccccacgcgtcttgttcacccagcctgaggctcccggcggccctcgtgttgcaatccgcaacccacaaggtgagtttccgtttcgcccagttctcttcgtttttattcatcttggaacccttctctaactgattatcagcaacacatcaatcgaaaagaccaatttagatgttatttcaatgtcttttgaccctactttagtgagttcttgaagtgtgtttagttccaaagtttttttttccaaacttccaactttccatcacattaaacctttcatacacacaacttttcagtcacatcgccttcaatttcaaccaaattccaaactttgggccaatctaaacacagccttggtctgctgcaaatattttcagcgcatttttatgaacacaaacaaatcagaattgcgaagtactgtaggattccaagcacactgtattagtacattggcagtagatttcccccttcttgaaatcgggtttagagcgtatagtttcctccagttttgttatcgtaaatgtattccattgaagttcataggtgttaaatgtcgtgctacaatatctgtagctctgaaatgataattgtcactattaacatgctaagttacataagatgcgaagctactcttcactaaagatagcacttgcctattaaatacgttgacaatactagatgattttcttcttgctcaatgtgttcttatctcccatatgcttatcgcaatttgttgaagccctcaattgccgcagcgttgagctttcctgtcacatgcaaggcacaagagttccccattgactgctttaacatggatcctgcttctggagcagatcttgcaattgccctgccttgatctaactggagacactgacgcccatgaattcaaatccaattgcaaaatatatgatcgattgggacagaagaaagatgtaaaaaatatcatctctgtacaagtagtcatagcatgcagacgtaagaagaaatccaccaatgaatagctcaaggcagtggaacctaagaagcaccggcagatggagaaattagcgcataactcatggcacagatcaagttcaaagtgattcttatattcatataagaatttacctgtctttgaaacggcaattcttggtaactctgacaatggatttgagcttctggatgtttcccaacttttgcgtgacaatccattcgtttgcccttccagcctcaaaaaatccgatcagggtggctttcaaccggtgcaatgccataacattctcaaataagaaccacagtatgatcagatggattgacctgaagcacatggagttcatgagatgtaccatccttttgatcatagtagctggtgacacacacacaaaaaagggtaaacagcactgatctaaccttggagtcccaactgaatggagtagaatgatagctgtaggtatgaggatcagctcccacaaaggaatctgcacctctggaaagaaaactttcataggaagcagtacgctgaaaaagaaaaaggtgaagaacgtcgatatgatcctccgtgcgatgaagaagtcatatgtcatgtataactttttccagaacgagactttctgcgttggaaaacaatggaagaatataagggctttcaggtaattctagcactagaagaaagaatgctgcaataattctccgagtcaaatacagtttcgatgcatcagtttccagggtgctgtgcaacttgagaaaataatactaaccttggcagccagaatttcccagaacattttcttgaacaagagtgcaggtccacatgaccagcgatgttgttgggaccgataggctttcaaagtactcggcagctcactcttaacctggaattggaagcaaactctcaagttatccaattaatctgctaatgtttttgttcatggattgccatgtcatcatggtagaactgaactgctgaagtgaggtaaaaataccttaatgctaccaacatagacaaattcccagcccagcagtcctgctctcagtgccagatccatatcttctgccgtagttcggtcctcccaaccaccggattcatcaatcacttgccttctccacactccagcagttcctggatgcgttcatgagcatataaaattctcaaaacctctgaaaaacttgtagaggagaaggaaagcaaggagcaattgcagtggcagaggcgagcaaggatcataccattgtagccaaagaagttgcagagcgaggagccggcctcttgctcaaccttgaaatggtagtccattgacatctcttgcattctcgtcagcaagcagtcgttagcattcactgcaaggcagcttaaacagaatttctctcagcatatgacaagcactctcatacttcaaaaatttagaataattgatatgagcttcggccatgtttagttcattggttgattatcaaacattgcaacaccacctagctaaaacattggtaatgtgcggcaaaaataatgagaggatgacacatggggtccactgcaaaaaaaaagagaggaaaagttggcatgacaaagatgttgagatcgcctgggtggatgggccgtctgtctctaaaataccgactaggccgccatatgtggacactagcactgggcccatcttgtttagctcggctaagattcatacatctccatcctaaaatatagcaaattttaaatggatgggacatatcgtatattatgaatctagatagagagtttgtatagtattatggtcaaggtttttcgtgattatcacgtgcggtaaccttgtcagtttttgaaaccacggtatgtgataaccgcatgggtatcgcggtaatcgccaaatcatagggtggttgtaactggtaaccactaaaaaacgatttggggagccctgagtctctgactaggatacgttccatccacttagaaattacaatattcttaggcagagggagtacttctatcactacccagaaactgtactagagcagtagagcacgaggtttattagtagcacagtacagtaagtcttcaactgctcctcgaatcaactgtggatggaagacgacaaccggcagcagcattatcttcgtagtactacgacgagtggcgcaaacgaataacgacaccgtaccatggtcagtgctgtagcagcgtaggctactttctttcctgcccaattgccccgaaaacaaacaaacaaagcggaggtgactcaccgaactcccatcgcgtctgcacgagcgcgaggcgtgggttgtggacgaggaacggcaccgtcttgaggaggaagtccggcggcggctggaagtcggcgtcgagcatggccacgaactcgcacccctgcacgtagccacgccgcatcccttccctgaggttgccggccttgtacccggccctgtccttgcgcgtctcgtacttgacgttgatccccttcttcccccacctctcgcactccttcctcaccagctcctgacccaagaacacacagacagattactttgtcagttgattacttccaaaatttacttcgttttggttgggcaactttcaggattcgatggtcccaccttgacgatggcgtcggtggagtcgtccaggacctgtactattaaccgatctgccggccatgtgagcctgcatgccgccccaattgatagttggtatacctgcattgttcactgtttttgtcaggtggagctaaggttacccccgtgaacgaatcctacagccaagaattgcctgttctatgctaactaatcaatcatgcatttctgctcaaaattttaaatgtttaatgcatgtaaatctgaacacgatgctgaatgcggcgacaaaaacggggattatcactttgctcttctgaaaaaaacgacagagcactgcagtgttcccggaaatggcagagttcagaactgattgaaagccatgttacctccttctcgttgtacatggggatctggacaagaaccatggggaaggacgcccggccagcctcatcgtcgtcctccacgacgacgggatcgcacctgtacagcctcgccggccgccggcggagcaacttcaccaccgcgctgaccaccccgaggaacaccttctccgcgagcacgatcaccgacatgaccatgcacgccaccaccgcgcctctaagcagcggcaccagcagctccatcctcacctgccgccatgcctgcaccaagctctccaccacggcggccaccgtgtcggcgaccaagagcctatcaccgccggcgcgcaacgcaagatcacctgcatgcaatcggcgatcgtgcacgggtgaggtgcctcttggagtcggagacaagaagtcaagaacactagtgctggtaggatcagaaggaacaaaatgcaatattgatgtactactaccttgcattgctgctgctgcttcctggcccttgtgcagtttcagacacttgattgaggaggcagcagagcaagtggtggtgcagtggtggttaagacatgaatggccatgacggcaatgggcgcactgttactggttgaatcgggctttggatgtacatggacatgggcatattccagatctagggtaagacggcgctgtttacgattggcacgttctcttcgctgaatttagctgatatttatgcaaagctgctagctgctgcgtaacattgttttatcggagataattgcatatggttatagctgggtaagtattgcctttggtttatggctgccatgtgagcctttggatgctttgttgacctgtggtcaatttgtgtttttagccatatccgcatcccacgcggttggctgacttgtgttggtgccatgcgagccagtactagctaggtacccaggctaggatctactacatgcgtatgacagcctgtgtgatagtaggagcaatatatgcgagatgttaacgtgtttggtaggccgcttaattgtggtcaggctcaggcgaaaaaaaaaactacttactccttttcacaacctaagcattaccataaacatatatatatatttagttatatatctagatttattgatatctatatatgaatatagataatattaaaaagtcttatatcgtaaaacggatagagtactactgttggtactactgagctagcagccgcaatggccgtctgactgagatgtctccggctgtgtttcttccttgtacgtgcagtatcttgggatggcaattattggaacacagtcatttagtcattgacattaacacgagcgcgcgaatcccgggttgtttaatggtgttcctatcccctaacacagttccaaatagcagcatgacatggtagtgtcagtagaagccctgtgcttcactgcttatatgaaagaaaagacaagattcagaacatggttaacatccggcactgaacttgcttggaacctgcactgaagagccgcactggcttgaaaaactcagaaagctggcaacatatacaaatataactcccgcgacccggccatctcgtctccaccatttaccaggacaatgcctttaacacacacacacaagacacaacacattcggtaattcagcgtgaacgtgagtacgtgaccaataagagcagatctcatgtagtagcagtgtagcaccagtagtacagttcacttccaccgttgctcctaccgtccggtggcatgatggcatcgcgtgccgccgtctcagcagcagcgtgccagtcatcgtgtgggcgcgaacgcgcgcgatgcgtctgagcgtctccgacgcagagccgccctagagaaaaagcgcgcccatccacggcgggatccagaggcgtcgcgaaaaataccaccagctcaccactggtacttggccttgacgaggacgtcctcgtagagctcggcggcgtggtcccagctgaggtcctgcgccatgccgcgcgcctggagccccctccagctctccttgtagttccggtacgtgttgaggcagtgcccgagcgcgtcgatcatccggttcgcctcggcgcggtcgaacgtccacccgagccccgtgtcggcgaacgggtcgaacggcgccaccgtgtcgcggagcccgcccacggcgtgcaccacgggcacggtgccgtacgccatggcgtacagctggttcagcccgcacggctcgaaccgcgacggcatcaggaggacgtcggcgcccgccgtgatccggtgcgccagctgcaccgagaaccccacccacccgcgcaccttgtcgttgtgctccgactcgaaccgccgcagcatctcctccaggtccggccgccccgtgcccagcatcaccacctgcacgtcctgcccggcgatccacggcatcgcgtcgccgatgatgtccacgcccttctggtggtcgagccgcccgatgaacccgatcagcggcacgtcgtcgcggacctgcaggcccagctgccgctgcagcgcctccttgcactgtttcttgccggtgtccagcgtctcgaacgtgtagttggcgtagccgtcggactgcaggtgctcgtccacctcggggttccattcggccatgtcgatgccgttcacgatgccctgcagcttccagtcgttgtggtttattatctcgtggaggccccagccaccgtccattgtcttgatctcccacagatagccatggctgacggtgaccgcgcggtcagccatcttcaggccagcggcgaacacgttgctgtgctcaccgccgacggggtcgtacagtctgaaatgatcgatgtagtgctcgggcaagtccatcgtggcgaagtcatctacagggccacgaccctgaaagaagaaaatcatgaaacatctataagagattagcatcaaggtaaatgcccacggatgacaagcgggaaaacaagattgaattacattgcgaaacgcaatcataaaataaatagaagccaatttaactttcattagaactaaattggtgtcactatgacagtagtatagtcaattatctttcaagaggcaaaatcaataactaattcaacttcgtaagaacaaaactggtgtcataaataaacacaaatttcctatattttctacatatagggtaaaatagcaggtgcactctgctgtattccagtacacaactctgaactgaattttgtactttatctgaataccaggtttaaaattgtatggcccttattaaagaaaaggagaaacacttgcaaaatacaaatgccattgagcagatcacttgaaaacaagtacattagtggttcagataatattcgaagaatgaaattgcagaataagactaggtgaaaaacctgatgagcaatgttgtgtatcacaagaacagagcgagtatactgcatcaagccattatctcggtaatatgccttcaaatatacgggtaaaagtgcagtatgccaatcatttgcaatgaagactaaattgccatcaccgtagatggaaccaccacatggagcaaaccaaggaacctgcaaatgtttcatcagatgaatgaattgtacttattcgagaacataacatcaggctcattcacctcataaactaaaacaaacatgaaaatcttatcattaattgttcttgtgttttctacaaagtagtcaatggcacacaaacagcttgctgcaagacactcagatatatatcgactgactagatggtgtactaaattctaattgtcaaacatcaaaattttagtattaactgtttgctacgaagtagtgaaaggtgcataaacagcttgctgcaagaaacttggatatgcatcgactgaccagctggtgtacgaaattctaattgtggactgtagtaagaaattattgtgtttagtcccactggaaattgatggtggtgagacctgggtggcccactcgtggtggagtgagctgcgaatctaacagaactgtaaggagtacatttatagactagtagcaataaaatgggaagttacctcaacagcagctttgcagaacaaaatcatacgcttcaaaacatcctgccatcaaatgataaaattgtgcaaaaaatatttacagaagatttaaaaggaacttatttgtaagtcaattaagctatagaaaaattgggacttacaaatctttctcctccataaatatcattgtgccggtgtcgaaagggaggggcctctagaaacacaaaatcaacaccatcgataaaagcatgaaaataactcacttctgaatcctgaaaaccacacacacagaaaaaaaaagattctatcatgaacctttaaacttttcatttcacattgcacaataactgtttcaatgttttcttacctgtccagctaccctgtaacgtttgcggacacctagatccttggcttctgcatattctccgtatcttggtatcacaacctaaaattgaaatagccacttatatttggatcacttaaaactaagccactgaactcaatcggtgcatatcctactacatttcaatttaagatgctatcttaagaattgtcatccatctcaagcatgctaaatcatacagctcaaaaattgttatctaacaagaatacaagatagatttccacacttctctcctaaatatgtgaaacaacatttaatagctgacagagacaacagggtaacaatttgaggattgttttccatgatgcacgcaaatcaaaagaatgagacttaagagtttcagatataacaatcaaaataccacctcttagtctcttacgttgtggattgcacatatactagtactacagattgttaatctcttccgagacaatcaaacaaagacaaatgtgaaggagtacgtaccataacacgatgtcctcttcttgccagagccttaggcaaagcacccacaacatctccaagaccaccttcacatgatagcagttattagaaggaacattgcctaagcttaaaagtaaaagcctgattggtcatgctcaaaaaggggaaatgatggggtcaggcccaatttccagtttagatatgcatacctgttttacagaaaggagaacattcagaagccaccacaatgacattcatcacatttggccctgccaatggaccagattccttgttctcactatcatctgcagagcttactgcacctgcatctccaccagcatcagccttagcttccaacggttcagcaacaccgacgtcttccttcttgtccagtgcagccttcgattccacagcttgtgcattaccatcagcttcagccttggaagcaggaactgacgggtcaactttgggtttagacactggtgcatcagatttggtagctctgctcacaacctctccattttgcttcgcaacggcaggtttcacgtatttgggtgatgaaactgaatcctcaacatgatcagcctgaatgcatatacaccatcactcaaccagaatcagcaaagttataagcatttaagcattatcaacttgaaaaatgaaatgtcacacaggggtagtggaatatactaaacaagttggatagggaaattcatgtcaaaaagtgcagcgaggtaacatttccgaataacaaatggtaaataattagctcctagctcgctagatcaagcaactgtagttctagcaacatggctctacatgtaactgcgctatttgcactaactaattgcacgttctggcacgcatactataatcaaatcacgaaaagtagttaaaatatcaaaatgacacgatctgaaagtctgaaacacgtgggccaacagtctcaagcttggttctaaaaaaaatggaggaaaagtatcaaccttggccgtgctgccctgcacagcgaccgccttcgagctccccgctgacttcgtcttcgccttcgcgacgccatcctcaccaccggcggccgacgccgagcacacgacggctccgtcccgaaccaaaccccgccgctcccaatgcaaccgcagccccgtgccaccatacaagtgccaccaaaccccgctcaccctgctccgcctgcgccgcggcgaagaggaggaggagccagcgaggaagagagtagccgccggcgaggaagcgattgcccccgacataggatccgccgccgccgccgctcctcctcctcctactactactactagattgcggccgagctagctagctaggcaacgagcggcgccgcgcgcgcacgaggtgaattaagcggcgggggaaagatctgccggaggtgtggctgatgttacgccggtgtggtccccgggggacggagggggtggaggccactggccaccgacggcggagagtggccgaggtgggtcgtgtcgtgtggagctcgggaatccgagaggtgggaagacgagacgacgacgagagaaaagagattggagggaaggcaaacggctcgccgctcttgtgcaccaaaattttcaggatattttcctgtatttttttctattttctgacaagtgggccccaccgtttggaatggccgtctccgattggttgtgggtactggggtgggccatggaaaggggcatgggagaacaagattgggttttggtttgactgacctgtggggcctcaatttggtgggtgatggtgtggggcccacgtgtcaggcagaggggagaaggtgccagaaggaccggcctgaaacacgtcgtgggctcgtggccctgtccagtctttggacttgatgatgtggtggcgatgtggctagtggaaaatgcagtgtgcggagtgcatatgcaatcggttcgctaatcaacttcagtccaataattcacgtctccaaacaataattttcatacttcaattcaatagtttacctcttcaaagaattttcctacggtaccgttgtgcaaagtacacaattagttgtgcattatactcggcctaaattttcgtcttaatttctatatggatatgaatcatttcagccggagttggattgtaaatccacccagccagtcaacttgtttacttaccaaaaaccaacaaaatcttttattatggctgtgttcggaagagctagcagtggctgcgctgcagccacaccaacaggatctaccaagtaaatttgtactaaaacaactgcagcactgcggctgtacagccactgtctagctgatccgaacaaaccctatatatcgtttgatgtcgctgaggcaaacatactgtgttcaaatcgagcggactcaaacggtatattttcaaatgaaaaataatttgtgaataaaacttttatatacgtgtttttagagatctaaaagcaaaggctgaaaaataaacttcgatgaaaaaaacccaaaatcaacttcaaatttaaggttgaaaatttaaattttgattgataagtataagtataagcgaaaagatgtggcccgagatttcttgaacataacactcaattatgaatgtttagaccaactccatggcacatacaattgcaatgcaaggggtgtattgaaaccaaccaacagtgataaacaataggtactttgtatgtatctcggagcaaatcataatgatgaagaaatataaaacatgaatgcctcaaatatttcatgtctggtttgtgcatatctctgtttcgacctaccaatgaaaatggcacatgcatctccaaaatgctccaaaaaatacaataaaacaataaatttcaatttgagaggaatgcatgttcatacaagaaatccaagaaaataactaatttgctagtatgaggcggccatgttctagaaaaatatcataataagttttgctaacttaagacaatcagagaggcccaagtcattcaacaattaacactagcacaatcaaaggaacatgctatgtggagtatacatttctatgggctctatccttactaggtggcacaaatcggcttacttactatattaggttataacgttcttattgtctcatgctttgcgaatgggcatgtagcctagtggttacagtgacataagtagtacaccaagtcctgagttcaaatctccatatgagcaaattttagattgagttgtttgaggggctaagttctcaatttaaaaggcttcatatattcggttgggtatagagaccagataaaaaataccattctctaaaaaaaaaattgtcccatgcttttaaagagactaacattcatggcctttcaccagctgaaaaacacccttatgttgagatcaatatttgtaatttctccatggcctcaaatttgccgagctcatctccaccacacatgcacaaaacacacacaaacacatgcatgaatccacatggggttggccacatatgcatgacatataatcttcacttcttccaagagatcgagtcaacatagggcacttaacacatgaaaaatttacgacctaacttttctatcatgtggcacatagcacttttcaccatttgctcttgccttctttcaattgccactcatttgcatattgtcaatcatcgaagaaagctctaaacattatagattatagaactaaggtatggccatgtggctaggttcaatcccatgctattacctattgcgcctcatataaacccttggatttgatccttgggttagtcatggcacatatgtatgcgcatcagtgagatagtggttttcatatttgttgaaggtcggatcggtatcatatattcctactatgtggaagcaaacatgagtatgcttgcgtagggtgtaggtatccacttacccttaagaagcgtatctccaaaaaccgaggagtagaaaaaccaaaacctttgatgatatagctcttgaagcttggggtctccagtagatgcctttgaaagaaagtaaaatctttaatgttctgagtgttcataccgcatacgcccatagcaatcacttaatagacgaaggttcgagagtttcaagagttactaagacccaagattaatgagcaacggataatatttgtttcaagcataatctataaaatcttttagtttgttaccctatcaaagtagcaaatgaatattttcgtgcatttctaaaaaaaagttggttttatagagcgacaaccaaccacattcattttgtaataaaaattgctaatgtcaatgcacccatatcacaatttggaccgctataccacgggattccgtccggacgatatgatatcaaataggtattagatctagatacccatgggtaccaattgatgctcgttttggtactagatctcataccctataggtaccatcagcatctcattagtatcaattggtaaccgtctgtaccagttgataccctatcggttccactggtcgatactcattgatactcgttggtgccattagatatcggcctgttggtactaggaggaaggagagaaagcaacacagacaaatgaatgtagtgttgtcctcttcctcttccctttttctcactcccacatgatgagacttccaactgaagactggcgaggtcttgctagctagggagaaaagaagaaggagctcgaggaggaagaagaagcttgacatatgatatcaaattcaaacaccggaggaatgacgagtttaagggaggacactatatgacaaaacgaagcccggtgcctccctaatatgcaatggctaaaaccaaacttcgggagctcaatccttcccttatccattcccctctatctcgctcaatcctttccttatccattcccgtctatctctttctcttcctccttctttctccctttcttcttccttctccggctcttgtatactgagacctcctccctactctgcaccacgtggccatcagctcgatcggcccaccccgcaccgtcaccaattgtagcgcccgttccgtcgtggcgcctagcgggaaaactatctcttaaaaactctatttgcgaaatttgtttctttgcttgttgtctagtgtccatgccatctcagatctcaaatccccgatctatcgccgagttcaatcccgaatccaaatccttcccaaatcaattcctccgcaaaagtctaatttgcctccccgggttcgatgggccgaatctctctcggcccatctccccctccctccccgggtctctctctctctctctctctctccctcttctccgctctgcccgcgcgccgcgcgcgcgtgcgcgtgagccgcgccgagtcgagccctcctccctcgcgtgcgcacgcccgtgtggccgctgccctgccgcgcctgagccgtccgcgccgcccggccccgctgccccgccgcgcctcccgttgcaaccgcgcgcgcgtgccgtggtggccgaccgcctggtcgccgccgtcgtcagcacctgcctgcgcctgtcgcccgtgtcgccgctccgctccaaaccgccccgccgtcatcgccgtcgtcatcgcccggcccccgccactccgcgcgcaagctgccaagggacggaggcagagctcctcctccctctgccgcgtcgcccccgctccctcctccttttcccgaagaggcaaggggacaagccccttttctctccctcttttcccctttttcctcccgccggcgtcatcctcctccctcctccctgtcgccgctttggccgcgaccgccgagcgctagccctctcctttgaccgccctaagtcggttcccaaaccgacattgccatcctataaacccaagcttccccctttcctttcctctcccatttgcctccacgccattgccgccgcctcccgtgctctgttcgctgttgccgttcgtcgttgcgcgtgtcggaggagccggcacgagcaaggacgcggaaggggactccgagcgcgccctctccttcctcttccccggcccgaggccggagagattactcccgcgctgtcggcctctcgtcactgcgcccgcccgcacggtagtgcatctccccgttctccctcctcgctccatttcctccccttagactcgggtagtagcacgagtagcctccccgtagctagccggcgccgccccgaccgttgccgccgctcgccatgtgctcgccgccgtcgccgcccgagctcggaagcgccgctcgtcgccggcctcgctcggcgcagctccgcccaatccaacgctagcatcggattcccgtagccgcgtagatgctctcgccgccgggaatcgacccctcgtgacctcgtcgccgtttcccccttctcccgccgccggttgccgccgccgcaattcgccgccgtcgggcatcctccggcgaatccgagccattggctcgtctcccctcgtcctgagcaaccacccggtgcgctcgctttcgcctgtatcgccgtggttcgctccgccgctcgtcgctgtcgtccgccatccgttccggccggcgtcgtcgtctacctcccgccagcccgcgtggcaaccacgtaggcgccacgtcggcgccagctcggccgagatcgggtcgggccgaccccggtcagcccctcccgtgcgtgcgttccaccgcgagccgtgaggctgcgcatgggcccgccgcatccgcgtcctccgcgaaccgcgcgcgtgcaccgcgtctctcccccatcctagcgccgcgccgcgtgctccctccgcacggtgagccgagccgctgacaagcgggtcccactcgggaccacgcgaggtgggcccggtccaccggctctctctctcctcccctcccgcgcgcgcgtgccttgggccgccttgggccggccggcccatttagctcggccgagccgccccttttctctcgggccgcgccctagccgcccgagggaagtctaatttccctccctcttttcttttcttttcttttctttttcaaaaaggatttaattaaatccttttactttagacccaaaaatccaataatcttagaaattcaatatcttcccaaccgtaaatccgtttgactccgttcaacttccaaaattcctcaaatctcgagatctatctaatggcacgcttagaggtctttaatagggctttattttcgccgtttgttgagttgtcccgtttcgcgtgtagtttcggagcccgaagactcgcagtgcgaggatttcgaggatcaagctccagatctcgagcaaggcaagccacctttgagcatcttgagcctatatttgaatttaattatgttacttgaaaaatattacgcattgataggatcgcacttaatctgtttgtcccgtctgcaaggcagattggcggacctacctaatttgttgcatttgatccttcctttgttaattgttatatcatgtccccttgtaaccatctagttgtgcctcgatattcgtgcaccctgtgcgagtatcgacggtcgccttcaaacttaaaatctgaaaaacttcttgggtaaaacttgggttttacaaaaggcttggaaaacccgacacctgagtcggtgcttgcgaactaaatgaatttccaaaaccgcgaatcggggaacgtaccgggtgtacggtttcccgctcttgcacctaaggaccgtttccttggaatttcatccgaacataagacaagtacgaccacatgggtggaatgggacacccctggctgagtaactagcttatcaagggagccttgatgccgagagacatgtggattcgccggggtggtgtcggggaggacccctgggcttcctggcatagtatggtctgggacctaacctgttgttggtctgggacccctctcgtcggcatatggtaaacctgtgtcggcttacgaaatgccttgtcatgaaagcttggaggtctcccgacgtggctgatccccacgggctgggtgatccgggttagtaatgtcgtgtgggtaaagtgtaccccctctgcagaggttaacaaactgttcgaacagccgtgcccacggtcatgggcggatgtgaggtgattccttgcgtagtgttgtttgactactgccttgtgaaattgctgttgtggaaaggggttcgatgtttgaaaaatctgcagctgatgggatcagctaggcccgggtggccgtttgaaagttgttggcccgggtggccgtttgaaaagctgttggccgggtgccaaccttgattcaattctaaagactgatacattgcacatacttcaaccggacgagacgcactgtctcatccatgtcgtttgagaagcactcacttagttgctttcagaaaagagttcaaataaaatcaattacaaaaacaacagcctttccttgaagcctgcattaaacacttatttcccatggcttgctgagtactcccgtactcacccttgctctacataaataatcccccccagttgctgaagaagatgaagcggatcccgctgacgaggagttcttccaggagcaagccggctacgatgagttttagggtttcggcctagttcccaagtcgcgcctgtgttgtttggtccaagtcctggcttccgcttcccttttgtaatgcggttgtgagctcgggatctgtccgcagcccgacttgattgtactcctactctataataaagagacctctgttgctgtgatattctgtcttcctgtgataccagcactgttttctgggactggtatcgattaacaggttaatttggagcgtcacgggctagttccggtcggtaatagttcggggcgtgacaccaatcccgtgttcgaagaaatcactcttcattgaagcactgcaacagcccccgtgaaatctggctgcctctgcatcgtttctttgccatacccgcatgagggaggaagaggatctcattctggaagctaagaatgatatgcgatatctagcattgccgtaaaatattggttaaaaaaatacccaacacaatcatttgccacccaattctttttattgccaaaactcatcgttaccaaatatgttttctgattacacgaaatacgcatacatgcacaccatgctcacatacacgcaattccgcaaatagacaccccagcacacgataaaaaaaaacagagaccaacgacaagtctgtgggcatcaagattttaatcatgatggatacaataatacaacgatcactgtggcacccgccacacttgatacagtagataatcaagcaagcacttcttcaagcttgtcagcacgcgtagcactgtgtactattacaactacacaagcgtcacggtacaaaaacgttgatcaacaaacagtacgacgtgacgtggcaaagtatcgtccatcacatacagtacacaacgatccaaaagattcaattccgacctggcaaagcgtcagccactcgcgcggatcaaacggcgaaggagaaagcggacaaaaacctcatccgtatccaatccgcgccgtccaatcgctcgatccaacggctcgtgtcccccgcaatctcccctcatcctatccactactcgccccccaaacctaacacttcactactcccaccctctgctcgcgtctcactctcgcgctcactcctccaccgccaggtcgagctcaaacgagagagatcttttccgaatccgaggaggagaagccacagaaacgatgacctcgctgtcgtcctccgccgccgcggcgcgcgccaccttcgtcatgccgtcgtcggttcgtgggggcatgagccgcggcaggaggatggcgaggctggtgacgcgcgcggcggcgtcgagcccgaagctcccgagcgggcggcggctgcgggtggcggtggtcggaggcggacccgcgggcggcgcggcggcggaggcgctggccaagggcggcgtggagacggtgctcatcgaacggaagctggacaactgcaagccctgcggcggggccatcccgctgtgcatggtgtcggagttcgacctgccgctggacctcgtcgacaggaaggtgaggaagatgaagatgatttcgccgtccaacgtcgccgtcgacatcggcggcacgctcgcgccgcacgagtacatcggcatggtccgccgcgaggtgctcgacgcctacctccgctcccgcgccgagggggccggcgccgaggtcgtcaatggtctcttcctgaggtatattgctaactcagtcacatgcattgtgaattttgtgagtaaaaacttctgccatcgtgttggatttctgattgctctgaacctttgtgcgcactgaacactaattttgcacgatgatgaacaaaattatatagtacctgcacgaaaatgtacatgtttgtttattactactgcctcaccaagagctgatctgtgtgcatgtgtgcaaaacccaaaatttctagtactgttcagaagatttgtgcatgtttgtagaaccaccctgaattctagcaaccgtaaaatagcatgaatatttgttgcaaatttatcttaggaacagtctatctgcgtggaaaccccaattttctaatacctgtaaaaaagcaatactaatttgtacgtgcatgttgaaataatgaaaaaaaatgataatggcttgatgtttggatatgttgcaagattctaactattgatttccgtaaagtccagcaaaaatttcattgaaacataattcagcaccacatgtataaagaaatacctccatgttctaaactaggcccattcggtgtgattgcaacatttttacttgatttatgctgccctgtgcattaacactattacaagtttattggggaaaataaacatgtttttggatcatgtcgtctctgttgtttgaaaggtatgaggcgcccaaggaacccaacgggtcgtacgtggtgcactacaaccactacgacagctccaacggcaaggccggcggcgagaagcggacgttcgaggtggacgcgatcgtgggcgcggacggcgccaactcccgcgtcgccaaggacatgggcgccggcgactacgagtacgccatcgcgttccaggagcgcgtcaagatccccgacgacaagatgaagtactacgaggagcgcgccgagatgtacgtcggcgacgacgtctcgccggacttctacggctgggtgttccccaagtgcgaccacgtcgccgtcggcaccggcaccgtcacccacaagcccgacatcaagaagttccaggccgccacccgccttcgcgccaaggaccggatcgagggcggcaagatcatccgcgtcgaggctcaccccatccccgagcacccgaggcctaagaggtaatcaacaatgccagaatccacaagcatttctgcatcaaatcaatggctggtcgatcggtcggggttgacacctgttcgacagggtggcggggagggtgacgctggtgggggacgcggcggggtacgtgacaaagtgctccggcgaggggatctacttcgcggcgaagagcgggcggatgtgcgcggaggcgatcgtggccgggtcggcgaacgggacgcggatggtggaggagagcgacctgcgcaggtacctggccgagttcgaccgcctctactggccgacgtacaaggtgctcgacgtgctccagaaggtgttctaccgctccaacgccgcccgcgaggcgttcgtcgagatgtgcgccgacgactacgtccagaggatgaccttcgacagctacctctacaagcgcgtcgtgccgggcaacccgctcgacgacatcaagctcgccgtcaacaccatcggcagcctcgtccgcgccaccgccctccgccgcgagatggagaaggtcaccttgtgagcctgagctgccatgaccacgaccgcgatcgaacactttgcttcattttcttgaggcattagaaactgcaatttgcggtggatcagtgtgcatgtatagtacagattcgcggctgatcaaacagatttgaacaagcgtaagtagagatggataagagagagaggctgtgtaccgatcgaccctgtccgattttcttgtacaacacaaggtgatgttcagacttgggggcagtttggttggattactgaagcacaccaatcttcggtgtgaactcaatgtactactatataagctccatgtttctgcatggttcatgtttcctgacgaatggtgaatgacatgaaatggtttactttagctgttcttcatgcaattctgaatttctccacagaacaaatgtgcagcaaaagacgccatctttattttcagaactaaaagcactagttgttcacacgccagatcgtgtctgaaaacagatatatacatgatacttcccatgaccaacataccaaactagtactgttactatcagtgaagacttggctagaaaagaggtatatacagcaaaaattcctacttttctgccttgggtcatacctaaaagcctgactagaaattactgcctacacatttgatcagccaaaataacctgattacctgcactatcctgatgttaccatctacaagcagagtcaccttgctacatatccctcttcatccttcaatcgccaggagcctcctcctcttgtagttctccttgaaacacgcttgccttaacatcttcgtccaatcatccagcttagcatcaggactttgctcgatgagcttctttgtttgctgcaacatctccactgcgttcctagtattatcttcgtcttggccagtctccatccctagctcctgcaggacatgaaattcagatttgctcagatataaacttagacactatactatttacatagatggaaaattacgggaaaactcttatggtaaggtaatggaattgttggtaaatgacttcgcccatcaaagatcaccaggatagaggactacaggggcgtgtgtgtatcagggttttcaatttcgaaattggattttatgccgggggtgaccaaaatttcggaaatttctggccggaattatttgaaaatttaactgaatttgaataaaatttgacaaattcacaaaaaattgcaaaaaaacgaaaatttcggacgagatttgagcataccggtgggggccgaaatttccgaaattaatttcgaaccgaaatttcaaaccctggtgtgtatacctcttccatctaatcgagagaaaaaaaatgagataggaaaaatactacctggacattcttgatgatcgtctccaagctcttgaccttgcggtgcggccatcgtgggatgccgagcaccctgcatctcctcttcagaagcgtgagcccgacgttgagctcctgcgccgcctgcttgatcggcaggcagaagtactgggacacgagctcgaacgtcagtgtcttttcccctgattgacggccgctcgggagtcgttgcagctgcagctccatggccttctcatgatccagcttctcttccttctcgccgccatctttgtcgctcctgtgataggcgtcttctttcatgtcgccccaaatgctcaggatatctccgtcgaagagggtgtaaagctcgtctgcattgatagatagaaaatacatgaactttcaaaactttctactgcatacttgcttgagtacatgatgcttcattcttcctcggtacagagacctgtattaccttgcacgaagttgctatgaacactagtgctgaagtggtgagtgaaaaagggctcatcctctcccagcagcaggtaatcaagactccaagatggcaaaaatggacagtgtcaatgaagagtacaacataaattacaggcatcagtgaagttctctttctaatgcagagtgcaaaaagaagttcatcttgaagaaaacaaggtaaaatgagcaaagttttgcaaaggatagcatcttcagagagtattagtaaaaacacaaaccttgcatgagattttgactgcttacctccaatcctgaaagaggttctcctcttcgtgaaagctgtaactctgaaactgatggcccccatagaacctccacttctccattggcaagggcttaagggcagtggcgtagctacgattttaggctaggatggtccaactgaacataaattttctttaacactataaatgtaatatgtcgacatagaagtatagaatttaccaacacaatgcgatcagttcatgcgatgccggtgcttcattcagcttttgtcttgtggcctgcgagcgtcgtgttggccgtcggcaagggcgcaagttctagtggcctaaccgcttactaatcaaattagtaatttagtacctaggattagagcttaatgaagacgggagggatcagagaagggagggccaaaggacaggaggaggagatgaaatatacttaccctgatcctgatcgctgcctcgccggccaccgattgccgccgtcggtcacgggagttgagttgcggcagcggtgctcgcgcaatcgttggcgcagtcgcgaactgggaagtgtggagggcggaacgacgactcgacgaggcagattgatcgccaaaaccaattagctccgcccctgattaagggtggagaagctgctcactcctcctgggaatggcacttagaattgtactactagtaaatagccacattcatgagtagctaatgcagtaaccgcagaatgagtgcgttatgcaaacgttaaatgagattagggaagtggccaatgatgtgtttgtgtactggagtagtagtactagcaaatctttgcagcctgcagtgtgttgagcagtgcttttgtctcctctctgcacataggatttctcattattaggaaaatcccagtttccaagacatgccatttttgaagcatgaacttttcatctaccctttgagctttgacgtcatcaacacactggctgatactattcccatatcgtggaggctctaatatccactgatgcactctactcacatgtaggaaaaccacaaacatatattcactcggtctcaaaatataaaaatttttggatatatgagatacttttatagtacaatgaatctgaataaagagtatttccagattcgtagtactagtaaatatctcagaacggagggagtgctactcactcatacggagtataaacgtacatataaccatgaacacctcccatcaaaatatttggctgtcatattttacattgataaagtcaatcactatagatgcctcgttagtgcggcacgaagccactgatgtagtaggctcctatggaagtttacgggctttgtgaaagaaaaataaagcctattgacggatttgtcggtgtcgttgaaaaaaataattagtcataaatatgaaatatgtgtatatgtgaacatatgtgctcgcataatttctatagaaacctttgttttataaaagagatttgtcatatttgtacaatttttaatgaaaaaatattagaaaaatgaaattcctacgtaagaagccatcgatagcagtattgcaccccagcggaaacatttttgggtgtagcggggtaagggcttgttcggttaattctcatgaggaagggattagaggggatttattcaatacctattatggtgtgaaattattacccctcagtcccctctaatcctcttcaatcccctctaaaccgaacaatacctaatcgtgcaagacgccctaagcttgtgttgtctaccgtgctcatgattgttttgggtctaatcagggatgagtaaaatctactgttcgtggagtatatggataaatgtaagatttttagtggcaagatgtgattgggccacatatattcaacctgcacagaacagaagtggagtagtacatctcgataggatggaaaagatcttcaaccgtcttgtagtactacgaaagacagaaaggaagattactaccccagtcactggtttatcagtactgcaacgtccattgtgtatactacccctacctctgtttgaaaaacttaccccgtaggatagtttttcctagaattttcagctacttaaattaaaatctcaactgctgcagctgtcttgtcaatattgtctatttacatttaagtcacactaatctgtaagaaaatttacttaaaagtgttgtctgattttctccattcttcattctctaaccgactttacatgatgcacgaacaaaattaattttagtgcaaagttatggactcaaaaccctcagaatcgctcctattaaagggataaagaagcagaaatatcaccggcatgttgcctcaatggacttgatattagtgcagcttgatccaatccccccccctttttttttagaacacaatccccctagtatatgctattccggcaaaccttcagcgagatgctacttactcacatgagattgggcatctgctaagttgcacacttgcattctagctctatccatgctgatacttgcagctaccaaagtttgcattgcaaagcacttcaataagtaggtgtgatgaagtttatcgtattttccattgtgaagttacttccatactatatcgcccaaaaacttcagagcaggaacgcctcttatttccatgtcgacaagaggtgcttggattaagttcagccccattagctctggatcattccttatcatatccaaagcacgtgtttgatcctggatgaaagaagatggtaaatggccctgcaacacagtttctacaagcagcagacaattactagagaatcatttcggcagattatgaactctacctttctttttatagcacagaatttacagtctgatgacgaaggtggtagaatttggttaacaatgagtctcttaacgggaacactttcatttcttagggaagaatgtagtcttgctgattcacttattgccatcacctgaaaaatgccaaaaggaaatataaagatggctattacactgataaatacatacagaaggtggtgggggaatggatacacagaatctttactgttggaatagtcacaattataaattcagttgattctgtgtcacgaaaaagttctcgcacttggaccatcctttctctcagctgctccaatttgtttgccttaagggggagaataacaaattcaaaggtttaaagacatggtgaagaaacaccaagttcagaggaattttaggcaaatacttactgcatcctgctgttgaacttcttgtccaaaaactgatttaatagctgatgttgcagaagcgatcttgctcctaagctggaaaaaaaaagatgataaatcagtatgacaaaccacaacttagatggaatgcctagctcttggtaacaggacttgaagaataactttgcattaattccttattaaattccagagacatgatatttcatcatatgaagcagaacaaggataagcggtttcttctaacaagtgtctaaaaaactctgatgaaaaagatgtaaacaatgtatttgagcagataaatattcaacaagataggcagccttccaatttcacaagttaacaaaaaaaaagcacaatctgaagctgcgcaaacgaacacaaatgaataatagcagaaatgcaataagcttcccgctaccatttagccacaaaaataacaagattgtagtggctactctctctggtcaccattatacaactttgactacctagttctttagcattttttttaaaagaaggttacataagtgtagtattatgaaatctcttgttatggcaaacttaaatatatcatttttcatagccccaaaacctatattttaagtgatatttatggtcaaagttaacttgtgttgactacacacattctaaaatgactttgttttgtgtgacgataggcaggataatagttacacaagataatacacattttcttcatcaattatgtatgtactgcaggccttacatcgtagcatgatagcaaaaggtgcagaagcaatcaagcaaataataccttcaagatcttcccaatagatgcatccaggaaatctggcaaggataataaacggagtgtatggccctgttgatgagggagacaaatcataggtaataatgtgaatgtgcgtatggagtcaattgtggattcacatatataggatagttaccgttggagcagtgtcaaaaacaatgcgtctaaacatgctatactcttgtgcttcaaggaattgcataacctggatgcaagtaggagtcacatgctagaagaagaacaacaagatgaaccaggtaaagcccatgacctgctttttctcacctttgaaatcgctattgcttcatccaatcctggtggtggtgtgtccaataactcccccagttttaactcccccagctatatggaataagatggtaataccaaagttaaacaaagcaattcaggcaaattcacgaacacaaggaccacaacattcagacataatgggaggtgatgaaatacagagagcgacagtaaacagatatgcagccttgcacctgctcagcaagcactcccagtcccatgccatccatgaagtcctttaccccagtccctccattcttctgacttgctgcacgaaactcttctcgggctttctcaggatttatctgcattaaaactcgaatatgccacactcaagcactatctatattgatctagagtaagtcaatcagaaggttgatctaaattaaatcattctgattccaaacaaatcctagaatttcacaggtagaggttttcagcttattactgtagaagctaaatgattatattgcatagctcaaagtttctcaaagcaaaatggatgttctctacgatgttcatatgctaacacttcattacaatctaaatgattatgttgcatagcccaaagcttctcaaagcaaatggatgccctaagattttcatatactaataccgctcacctcaagcgcaaacaatggcgcctcaggcccctcgaccggcacgagcgccccgccgctcaaatcctaaaatgagtaggcaggaagtgatgttagctacgcagtacgcacacaagaaacctcgaaccgagacagcaggtgctcgacgggggaggcgacctgcgcgaaggagtcgctgagggagtgcgcggggtcggtggagacgacgagggtggggtgcccgttgttggcgaagcgcacggccagcgacgccgcgcagctcgtcttcccgaccccgcccttcccgccgagcatgtagtagcgcctccgcgtcccggccgccatctcctcgaaccccatctcctccgccccttccttcgccgccgccgccgccgaggcgcgcaggcgcagcgaggcgtagcggccggggagactgagcgggagactcacgaactgcgcccgcactggcgccggcggcgagaggctgccccacgcggcggcgcggaggcgcggggcggcggtcgcgagcatcgtggcggagcggtggatgaggcggagacgggtcggtttctccgcttctccgttctctcacggcgacaccgccatcaactgccacgcacgcctcttccgcgcaagacagcccatgggccatggcaactcgcccatgtaaagcccatgatcagcgtcagcccatatggaggttagatcaactaagcaatcctactgagccgatagcccaattcgccccaaacagccttttactgtatcaaatcctcatctttattcccattttcttcagaaaagactttcaattacggcctcatttttttatacttataattataagtcaaaagttaaattttaaaactaaatattgaacttattttttttatcgcagtttattttacaacatttatttttgagtcgttagtgagacttatatgaaagttttatttgtaaattattttctatttgttaataagctgtaaggataagcatatgtataagagaaataatagggctctttggagctcaagccaggccaatgaacatggtcaacattgcacaagaatctggactacgatacagtagaaatcgacctccacaacgcggaggagcaaaagaatcattcaaccatgattaatcatgataccatggacctacgactacagaacgatccttaggttcagggctgcaacacaggaagtcatgaaccctgcacactacagtgcagatgatccgggatgacccttcaccgagttggactaaaaacgcaaatgactccaaactcctcctcctgtagctgagtcacgtcgagctcacatccatcaggtcggcattgcgaatgataacaagcgtcgcgttgtctgtcagcggctagttgcacacactccagtcgttagccaccctggctggcaaacgagggccccggtttcgcttttcttaagtcgcatgggatttctctgtcaatcgctctgcatcgctagccgaatgtggccatgataaacaacgggttttgcaacattctacaacttggtccacttgtgagccatcctgacaagggaaaaaacagcgagattagcagataaattagacggtttcatcagctgttaccgacatgtttggtgccatatgaaagttgccttgtcgcctgttgcaaacaggggattctaaatgccgaagcttttctggactggagagagcgagagcctgcttagtcaactgactgattccttcaagataacttgctgtcgtgttcgcggccgagctagattagcttagctcctggctcttcttgattagacaatgtgataatctctacacgcaaggatgacaccacaccttcaataaactaaccaccatgcaaaaaattcttcagggtagcctaaagtgcgtactaactccagtttcttattgcaatcttttaccggtgcaataactaaagaaagattggaacatcatcagatatttgttccagtacttcagtactccctccgtcccaaaataagtatagttttgcactattcacgttcaacgtttgaccattcatcttatttgaaatttttttatgattagtatttttattgctattagatgataaaacatgaatagcactttatgtgtgactaaatatttttaaatttttcacaaattttttaaataatacggacggtcaaacgttgggcacggatattcacggctgtacttattttgggacggaggtagtacgtcaataacacatgaaaaaaatctcatgcaagtaaggaagtaaatcaaaggagaccagcagtcacaagtctcatttagaagcagtaagggcagtcccaacccataacactagacatagtttccataaactccacatcatcaagaaactagtcctagatactactcttccaatgcaaacaccactattccatactccaatttaatgctatttatctcacatgatgtcttggatgttgtgtagaaaaccatgtcccatgcaagatatggtttccttctctttcctcatttattcacttgccacatcattttttatcctaagtggtaacttatttaatgctatggacaccatcctagtcattgggttgggaataccctaatactaagagcaagtatactagtaggctataagccaactataagcttatgtggatgaaagagaatttgaaaattagagaggattggctctaatacaagagctagcaattcacatacttcaagataaatacattaaatgcataggtgagagatagagagaggaggagaaaaaaaaagagataaccttgtagctcacttactatatatgttaactttaatataaactataagcttatagttggctccgttattaaacttactctaaggaagtacattattgattcttgcagctgaagagtgtccattgacacacatgctttctctgaatgaaattgctgcaacaagcaaggggatcgaaaacgatgactgaaagtctgaacctgatgttcgatggagcaaaaattgtcaacagtttcaagcgtgtgccagctacaaaaggcagggccttactcctcaactactagtagccaagccgacctaagatgaagagagattactggccagcagagtgatcaagaactaatcagtgcagtacttggctggcccctcctacacggacgcccaaacggtgacatcaacggagccaaggcgacctaaacccggcgtcaaacgcaagggcccttcagttcgtccgtatcgtagactctcgtagtgttccagtagaccttatgttttcctgttgttttccgtgcaaaatcaacgatcacgctgacggataaccaaccttgataggggctagcataagtcgatacaaatgccttttcaaccatcagacgaccacgatcaaatgctggattgctggtcttctcatgtcggctttgctcaaatgaatgaatcatgtagtgatacatccatgcttctactatcattactggatagagcagttaaagttacagtgattttgaggttaaaggccctgtttggtagtactgcttttgatcatgtagaaccaccaaagcgcttgtttggtttattactgatgcaacctttatcaaaactaggaaggtggcccgcgcatacgcgcgggcacttatattattgaaaggtaagatttttattgtttgttaaaaaaaatatctcataattaagggcaaactaaagttcggatattgttattttataataatttaagggttcgattttttgttaagatatcttaaaaatccatttacaaactttgagtgggagatggattaagtacttacaacttttgaaatatatttttttcttgagtaaatagattaaatcgtctcatgaaggtgcatgatatagtaagaaagggagggaagcatattcatggagaaaagaagaaatgaaaaaataaaaaaagggaggggagtaggtgcgtaccaaaggtggagaggtgggacctcgtagtatttagtttattctaatatcaatttaatctaatagtttataaactattggacccatcgattcaagtgaaaatcaagtaatagatactttgcttttttttttcttagaatttctaatattttctctaatttattagagcaccacgtgtcatcttgagggcattttaagaaattttaatggacttaccacatgtaattagaatattaacatgtaatatatatgtatgggatgtatgttaatattcgttctagcttcgtccatgtttatatatatgtagagaaaaattaaatatgtcgctagcaagccattagatgtttaattaatagcaattaattttgacacctatttacaattggtcatagtagttcttacagattcatcatacgattttgattatgcgttgatcaccaatttacttatcaccatgactcgcatgaaaaaaaatatgtactttagaggttaggataactgaaattgatgaattatcttatttatgtgatagctatttgagattataaacgaatgaattgacttctaaaaagttaaaaagttgtttaataaaagcaccatttagtaacttggaaagcatggagcgtgcaaatgaaaattcaaaagatggaatcagggaaaaaatagggccttaaactcccttataacactcttatcctagtaagagttctattgatattcgttaatattgtgttcacaattataacataatgatttctttcaactgtacgaacaaataatacaaaatccaaatacaacataacacaatatattataattattatttaataaactctcgatttcatcttaaacagagttaagtgttccacggtacttaattcttctctcgctgcatcacacctttaatatttttttcatgctattaacaaaagtggtagcgctgcagcggtcgtgatcacccaagatgcctcaaatacgacactttgtcacatgtgcgaaaggtagaggtgcagacgtgcattgtgcagtgggccaaaaagagaactttagacattattaacaatagatccgatgatttaaataatgggtccaccggttttagtgcaaatgtaaattagtttatatatatatatatatatatatatatatatatatatatatatatatatatatatatatatatatatatatattaaattgtcaatttaatgggtacacaacataatggtaatggtgtagattttattttaaaacaatgcattatttgagaataatagtccaaagtaataaaaaaatagatccgatgatttaaataatgggtctatctgtttaagtacacatatatatatatattagttaatttagatcttaaattgtttatttgataggtacacaatataatattgtgtaagctttattttaaaatagtgcattatatgaaaataatagtacaaagtaaattatcttacactattgattttagagctaatttacatataatatggtgtaaattttattttcaaagtctgtatagctaatttagttaattacctgtgtttataaagagttatatgatgttttttctttttttaaaaaaaatatgattatttaaacaaatatatatcaaattgtataaatggaaaaaagaagaaaaaaaagaaaaaaatggagggaggcgtacgtactacaggcccacatgtacgtacgtgacctatacttatgcacgcgggagaaataggagaggtgggacccatattatttggtttgttttaagatcaattttatctaatggtgtataatattggacccatcaatttaagtgaaaatcaagaggtagatgttttgctttttttttagaatttctaggattttctctaatttattagagcgccacgtgataacttgagagcgtttgtagaaagtttaatggacttttagtatataatagattttaacaatgtcaatatttggaccatgccaaagttttggtaaaaggctggttaggtctgatattttgccaaaattttagtaccatcaaagcttagtgtaagtttggttagagctgaaagtttggtttgatgccaaaattaatgaatgttcgatctgtagataagtaacagctgtatggtttgctacattagtggtgtattttctatcatcagtatagaccaccgtaaaaattgtaatggctcatgtcatttctaccgtttgtaccctcattcattaataacactttttgaaatttgatggctttccggtggtctgtctaatttaaccgagtaacctagctctcaacctcatagtttactccatagctaataaactgtagaaaaataaacgaaacaacgaaaaataattaaaaaaacttgaccagtgagaaaataagtgtccgatggttttcattaagaagaaggctccatcaaaccaaccgagaaaagccacaaaccctcaccccccccacacacacacgcaaactcattcatatggatcgttccttaactcattctttgaggcccatgcttcctatacgaggcccacgctccataggttgattcttaacacatttttatgaggggcatgtgaaatcaaagtgtgttttgattgttattttatgatgaacaattggcatatgagataattgatttcgatatttgaagattattagtgaagtagttttgctctttgtgtggagccagttagaccgggcaggataagctggtcatactggcgtggtgtgcactgtcaaactggccaaaacgacagcatgaccggccaactttatgtcgatgttggtttcgggttttttatttgtttattcgtgattatgacttatatatgaattctatacatgtgtaataatgttgagtaaagttgagaaagaacttatgctcagatatgtttcttcgtttgattcctgtgtaggtgtgctttgatgcatcgggagagcgttgccgatgatggtcaggaatcaacttgggagaagatgacatccgggcgattgggatatcatgcgagatgcttaggctaaaaaacaatgcacgtggttgatggagattccatgaggcatacgatgggagattgtgtacatatggaataaggagtcgatttaaatttaggaagattggaatttgaattggaaagagataagtttattttaggtacgagaaatgtttcctagtggattaggatatattgcacaagttagattcatggttttaggctgcttatctcgggtataaatagagaggggattgaggcctcttgtgatcgattatgtgtaagttaagtttaaagaaaagttagggtttcgagtttagtccaattctataagagaagtgttgttattgcactttgtaaacacgaatatatgcaaataaactttaatctacttttgagggttttcgatttgtgatttgctcggagtacaacagtcacaccggaagaataccgacggtcagaccaacggcaactactcggtcatacaatcggatctatggcggttggaccggaggtgtcaacaagaggcggtggcttgattgcgcggtcagaccaatgaggcttgtacagtcagaccaaagatctaacactggtgtaacttttaattccgctaaaagtgtttggtgttgctaccattcaacccccctccccctcccctctctctgtttggtaatcttagttctcgttgttcgatcttacagggccaacaagtgattttttttaattaggcttaaaattcactctcttggggtgtcgaactcaaaacctagatgtgctacttatcactgtaactgctaggttacatgttctttcccaataaaaagtaatttacaggtaaaatttttatatccgtattcttagcggtttataagtcaatattgaaaataaattccaagtaagaaacttaagttcaacactacaattatgttttaaaatttaaattttggtcacggctgataaattagaagacatactatgagtccgtctttttctgtctgattccagaacaatcaatatctacatatgaatccatacattatctgctctgatttcgaaacataataatataggagaaaagaattaaaaatatgtgtaatcattattcgtcaaaatccgatatgtttcatagttccatacgtaattgcttggtttgacagtggtgaatcgatctagaaccttcgacaacaatcgagaacatatatggtcctcagatcttttgttaaggccgtgaaaacggaggtgattcgatgggaagacagacatgattgattgccatataggaataactgattcaagttctgaggtcaggcgcgcgccattgcagatgcatcagggaacctacctacagtattagctagacttgtgcaaagtaaaaccatggttattctgaatctaaacgatgcttcttcagagaatggttcagggcaccatatcaacttagcagatatcggatggtacacctgacctcaacatggggtgcttttgctactgcttgatcacagggtagggcctagcattatgccaggaaatgtagttagattcatacacacaaaagtgattaacaagaactacactagtggcctgaggagcgcagacaaaagaagatcaataatcagcgaaggtaattatgccagcttctggatggatggtgcatctgtgattgattcactgatctgatcgctcactcgtcagctatcttggttccatgcctctcatgaaaagctaaggggttgcagagaagcgtggattttccctcttgtggcctggcctcatgccaatgcgctagtctcatctcaggcagcacaagctgtcttttcatcctgtagatcgtgcaaaataaggtgctggttctaaacgtgccccagaaagcgctctctgtttgcacatgtgtgtatttagtggtatttttcagtaccaatatccatttattttcatttaatttgctttgctcgtaaagtagttcttgattctacatgtatacatctacaaagtattgatgagtgctcattacagaaggcatctcaaatcaataaattatctgcatttttgcgaaagaaacctgattgaaacacctcgtgaacgaaatacctagcaaactctgtaaggcctgagattttcaccaagtcgagtggctgatctgcaacgagctgtaccgatcaaaatatgggttctttcattctttgtgatgtgtgctgattttccaatcgaaaatcattgtggcaagattttgtcagggcatcgccgtccacactctgctcccccaccggggatgcctaccaagggaagaagaggcgtcataactgccatacacttgtgctgtctacggccatcagagcattgaccatacgggcctacttcacagaacatgattgacctgtaaaaatcagcttcagactttgagttccgaatcctgttgatttttcattgagtttaattaggagtaggtggcattgctcttcagatgatatgtcgatttctggcattgctctttttaatacaaggtgatgaaaattcagctgcctgaattggagttttgttttcctgaactgtagtatctgaactctgaagacagttactgatagtggtagtacaagatagtactccctccgttttgaaatgtttgacgccgttgactttttatcacatgtttgatcattcgtcttattcaaaaaatttaagtaattattaattattttcctatcatttgattcattattaaatatatttttatgtagacatataattttacatatctcacaaaagtttttgaataagacgaacagttaaacatgtgctaaaaagtcaacggtgtcaaacatttcgaactggagggagtatcctacaggtacagtacggcaaaaaaagaaaaactgaatgtgagctaagctcaatgagagaagctaggattgcaaattgctgaagtactccaactgacatgagatttttcaatagtagcaggtcagttttgacagtgaccatccaagtgcaacgtcctctgctctgacattgcttagcattgctaaccgaagcatgcacactgcgtaatagagtggttaggataaccccttattgtaatgtcacctttgcaaatccttaactgctcggatatttcaatttggtcaccagagatggcaatcctacaattgaaaatttgttcagttgccacggatccatcattaatctggcaatggcggcaacctctgacagggacaatggcaaattcggccaatagtaaatttcggtacggtttatcctagttggcattggcacacatggttcgtctcttctacgagtatagattatgaaaaatgtcaacttacaacaggtgacgaatttcgcaaaaaaaacgtattaacattcggcatggaaaacgtacgtagaatgaccaaaaatatccatccctatagtatcatttctttcaggggagcccccaatctacaaaagaaaaagaatttgttcgtcacccatatatcggcgtcatgacctcgacgtcgcgctttatccaggcatatagtttacaacaccttgtgaattgaaaacccacaattatttcagtctaacagcagacagaggcaacgttgctctcgttgtcgttcacggggggatgacgcgcggttttatgccctcgacgagaatacaaaatcaagtatgcgtttctgtttctcggccaatgctgatccgacaacgtgtttgaacggattaaacaaaatctgaatccccgtcgaaaaattagaccagaaacaatgatcttatgctgattaattagggctaatgagctatgcatgcaagcactgtacccagtggtgctccgacaagtaggcctgcctaatcaaaaggcagtgaggactgtaactactagtacctgccacctcccagttgctcaggcttctcaaccttagctagctcgatctccctataaatactcctgctcattaccacaacgagcaagcgatcgacggagcgagcgagctagccagccagtgttagagcttgagctgcttgttcttcttctacctcctgcactcgcgtgctgcacaagtagctcagctagatagagcgtcagaaatggccagcaacaactcgagaacaaactccagggcgaactactccaacgagatccacgatctctccacggtgcagaacggcaccatgcctaccatgtactacggcgagaaggccatcgccgacttcttccctcctcacctcctcaagaaggtgaggagtctggagctgaatgattaattcttcagactttcagagctttatctgtctttctctggttgcttgattgattcgagatcgattgagctgggggggagctaatgcgtgcacgctgcttggatcgccatggctgcaggtcgtgtcggaggtggtggccacgttcctgctggtgttcatgacgtgtggggcggcagggatcagcggcagcgacctgtctcgcatatcgcagctgggacagtcgatcgccggtggcctcatcgtgacggtgatgatctacgccgtcggccacatctccggcgcccacatgaaccccgccgtgacgctcgcgttcgccgtgttcaggcatttcccctggattcaggtatgcagatgcagcaacacagctacctcaaactgccaattcttcatatatattacttcttgcatcaaaatatatatgcaatataatagttagctatgtgtacgacttaagccatgcactacttcggcatactagctagatgctttcttagtttctttcaatctgttctttgccaaaagatgttagcagagacacctaaccaattgagtgctgattgaatattagtagtcacataagaattttttctgaaacgaccttagcttgttccggttgtctttttacatatgatggtatctgaatcttgttaaatttacctccgatagctacaattttcagagtttcgtcagctttgatcctctccatttttttaatttttgacgcaaccctcttcattatctgaaaaactttttaaatctcaagagagcaaaatcattggctaatttagtcctcacttaagtacttagtttattcacgcgttcttgtcaagatgttgccatggatttgattctgccaaattaaatctctattttaggcatatatgccaaattattcagtctagcttatgtcgccggccagaaagaaagtcaaaaggcaacgagaggtggtatatgctcatgtaacttgttatccgaaccaaccaatcacatatctttcaaggtcattaaacttatatataccataatgatgcacacatccgcattgtataaggaattaatgtcgtctcttctgtcaacaacatatatcgaccttaatccataggtccttttcactacacatttgtctagctagctggagcctgaaagcaagcaaccactccatatcagcaacacacaaacaatagtacagccagacaacacgttgggcagtagcatgtgatcgatcgatcaccagattaattaagctcacatcaatcaaaaaatcagacatctgaaatctagcatgaaaccgccacaaacaattcaggctcgtgctaattgaacacgagcaatcacgcgtcaaaaccccagcacagccaaattaaagatgaagccactaagctgggatacgctgagttagttgccacggatcacattccatatagtctatttttacatcgcaatccacagggcacttctgctgctgctgctagtagaagacaagagtatgatcgtggtcgaggcttttttgttgccactgcacgtaaagctagcagggacaagtgtccgtagcgatacagtacaggagaaccggtcgcgacgcaagaattcatgtaaaggcggtggcgtgcgtggtggttcatgtgccatatattcggtcgatcgatagggatccgccggaaatcgatcgcctgtggcgccgtcgtccgatcgatcggcaccgaatccggggctaagctagttgccgctatctgctatagtgctatatatctatctatatattcactagcacacacaccggtgaggctgaccggaaccgattcgatgttcccggcttcaacagagacatctcgcaatgtgcagttagatactactgcgactgctctagatcgatctccagctagaggtgcagggttaaagcgttgaaatgaaacatcttttcaacctattttttttctcccttacacaggttccgttctactgggcggcgcagttcaccggagcgatatgcgcgtcgttcgtgctcaaggcggtgatccacccggtggatgtgatcggaaccaccacgcccgtggggccgcactggcactcgctcgtcgtcgaggtcatcgtgacgttcaacatgatgttcgtcacgctcgccgtcgccacggacacgagagcggtacgcgtcgtccacggctttcacctccttgtcgtcgatcgatgatgactgaattttgccgtaaaatacatggactcttgaccggtgtttttttccatatgcaggtgggtgagttggccgggttggcggttggttccgcggtttgcattacgtccatcttcgcagggtaaatacgctagaaatcgacggcccgttaatcaatcagctattcaattcgttcattcatgttcatgaccaagaagattagtactagctaattaggaagtaattaacttggagctagtagcaagaccaattagttaatttgtagccacttgactcctgacaagtgagaggggggggggggaaaagtcaaactaacctggctaatcaacattatctttgatcgatcagtaaccaaattaataaatgtagggaaacatacatattgatcaggcagaacgtagaaactaaactagttgagcagaatatacaatggagactgagacgcagcgaaaaacgagtggtggttgcagggcaatttcaggtggatcgatgaacccggcaaggacgctggggccggcgctggcgagcaacaagttcgacggcctgtggatctacttcctgggcccagtcatgggcacgctctcgggagcatggacctacaccttcatccgcttcgaggacacccccaaggaaggctcctcccagaagctctcctccttcaagctgcgccgcttgcggagccagcagtccatcgccgccgacgacgtcgacgagatggagaacatccaagtgtgataggacgacgagatgtcgtcgatcgtgtcctcttactcggaaaattaccagtcgatctcggtctcgtcatcactagctacgtctttgtgtgtgttttgtgtcgtgtcactgctgcttcgtacacgccggagagagttacataaaacgcgcgcgcgtgcacgggggagtggcgctagctttggttgcttggtggttcgtgtggggtacgtagattgctcgctctgttaattccggggctggagcctgctaattttgggcgtgtgcgtgtgccgcttgtgcatcagtctctgccgtcaaattgtgcgtgtgtgccaggtgtactatctctccagcagttgcttgttccacttcaattcacccccaaagtaattaaaaggatgtcacgttctctcccctatataaaacatctgcgactttatatattgttgtgggggttgcatgtcttgcatgtgcgttatcattccgtcaatgattaactgatgatgtcgctaatgatcgatagagcttggttgacctgaacaataccgtggggcactggaaagagtattgtcatgatatcggcccctgtcgcgggcatgaacacttgttgagaaaaccgtacaaacagcactaaaacagtgtgttttcatgggatatggcaccttagttttctcttctcctcttctccacgtcaagaaaaagctatacggcgaagcttaaaatgacacatttactgcttttttttcatgctctaattaatgaactgcttgcttggagtaatcatttagagcctagctgcctagatttatcaacttcacttttatggcgtacttctcaaaattgtcggcagtcggtgcagattttttttttttatcgacacagagtgtacttcccggtaaattggtcggcaccccattttcttcaactatctacatggcatttgacagaatacatatataaggctgagttcttttttcaactttcacaactcacatatctcgttttccacgcgctcgtttttcaaactactaaatggtgtgttttttacaaaaattttatatacgaaagttactttaaaaattattttaatatatttttttaaaattagtaaatacttaattatttataagaaaatgtgtcgctacgttttgcgtacgcgggaggtgaacctcacctcccgaacacagcctaaaaatattgtgaattctaaaccgttgaatcattttgaagttgtgcaacatcccctccccagcctctcctaccaccgtaatattgcgtgcagatgctccctcgcctcctaattgccatctcggcagaccagaaggtgtcaacccccccccccccccgcgccacccctcatctccttagtcggctggcctcctcccttcccatgccccctctttcctaagctggcggcggtaagtgcctgtaacatcccggcctagggtttaataggattaatagaatattcatatcaacaagttgcaacttcttttccggaagccaatctccaaataactccagggttaagcgtgcttggcctggaaccgggaaattcttcccgggtgcacacgagtgaggacaaaatgtgcagaaaagacatgtgttggtatgtgaggacagtctatgacctatgaaagctgccaaatgtaagtgggcccggcctgggagaggcgggtcgttacagtgcccctaccccaaccatcttcctcgtctctagaagcaacctgctgctaattatatataaaaaaaaggtcaatgctggctcactgccctcctctattcccttggctccgatgttgtcatccgccggcctgggagaggcgggtcgttacagtgcccctaccccaaccgtcttccttgtctctggaagctccctgctgctaattatatataaaaaaaaaggtcaatgctggctcactgccctcctctattcccttggctccgatgttgtcatccgcctgtgtccaccgtccaccatctcccatggcctcccctctaaacccgacaatcccccccctatctcctcctctcaccccaacactaacccataccctaaaccctgactcatgaggccattgctgatcaccaaagttgtggagttaggttcatcgttcactggagcatgaatcgtaaagcaaattataaggttagaaatttataaagattttaccctcccatattctcttcaacatcctatttgatgttgtggagtagtgaaatataatgcaaataattgtgaaaagcttaaagaaaatcataacagtgtatggtggtcccttaagtaactaatataacatagaagcagatagggattgtgcgcgtgttgataggtttgaattttaacatttgcatgaaactatattatctaacgaaatgtatgagacactgaatgaatcattttttatcacttcaaggtggtcctcagctgtagctttcgagtttttttagattgctcgatcaaaaccagcaaaaagagaataattggtgctgtccattgttcttatctaatctaaacggattaaagtgcgtgcttattcttatatactactacatccgtaatagatagcacaagcatatactatgtgctttgctcctctaccttttcatcattttctccttttgcttggatatgtgcaatttagttcccgtgcctaaatttagtatatctagctatctaatgattctgtactcgtatagtcattttcatccacatgccaattaattaaggcttagttttttttaattatttaacaggttgtacattgaaatagactatttacttcacattccaaaaaaaatacattttataaagcaacttctatggtattgtttaggagtgattttatagtacttgcgaagctatcgagagataccgtattttctaatataaattttaatatctctcggtactttcgatcctagaagatacaaaaatctgcactaaaaaattttagtgcctctggtactttttgatatctctcaaggatcgtaaaatttctaattatttaaactagttgttttaagttatttgttaactatcaagatatttaatatatatactcatattaaatagataatccataataataatctgcttgtatgactcggcggaaacggtggatcactaactttctctagaaaagatagaacgaaagaaaatccccggtctggattttggaatcggcgagccgcggatgatatttgcagtgcaatctaaataatcattacctcactctaacaagtgatcaggctcacaaattcatatggtgggctccacgtcatttcgtaagacaacaatatacaatcatgatgacgcaaccagtgcaacaatcaacaaaagaagtccatcaattcgatgatgtaactatgtaaggctgtttctcactcacgcaagaagattttgtgatgtgttccctgaaccattttctaacagcgtgccaacgtataaaatactactaccagccgaacaattaagaaaaacattaatcttccttgcaccgtctgcctacgttcaattaacctcctcagatgctacaccagtctttttttttcttcaactcttctaacaaacaaataactctaattcaaagagtttaggatgtacaatattcagtataaaggggtaaattaaatggagttataaaccggaattaaaaaccctttctccaacagtgaaatggagttctgttcccaccaaagaaagaaatagaaaactttatttcacgaataaacatattggaggtagatcgatcactggattacatatgtgatttatactacatatttttttcgaacaaacatatcctgagagtctaaataggacctggtctcataagatttttttttcctctccaccaccgccaagcaccaattaaaacacctagctgacagaccaagctatctgtaccaatgtaccatacagtgatcgttcaacactggctactgttatcactactagctagtgccacccatgaacatatatggaataagagacaacgatgaccacacttccacacaattaagggcggcgacgacattcttcgcgcggaaccaacttgggatagatgagaatacagtactacaatcatgccagtaaagcctagcatgccgcctattgctccacagccattttcgctatcatgcatggcctcacagcgcaggacgatcgagcttgcattgggagctgaaaatcacccggaggagtcgctgttattcgaccgatgcatcgccatgggtgcagtggtccccggagcatatcaaaacagtcgcccaatggctgcttgatcgtcaggtctgctgttgctgccgcatgtcgtcgtggatggcctcccggccatcagtgtaagatgaagctgtggccgttaattgctcgactttgcgtgcgtccggcgccgggacccgccggccatgcacggtcggcttgaacatatgtccgtcggtcgccgtcgtcaccgaatttcaggccgctgctggacagaaagaagcatattctggtgtcgtgcaataagaatctagaatgagccctagagatgtaggctttgcaagagaagagaattttatatagccacttccttgttcttcatatatatagctagaagaaaccagggataaaaaagaagcaaaagtgggtatgtttcattggtgttttggttgaaatttgcgagtaatatgtgttacatatttatttgaaagtgcattgtatggttgtaacctgttagttaatactatcactttttttctctaccacgacaatgtcatgtgttttatcctcaatccacctaaccagccaatcaccaatcatatataggtctcaatctactttctccaccattccccaattatatatgggtgtaacccgttataatacacggacttatcaataaaactttcagtaacgtgcaccgcgtacatcgtcccagcatactgcgtttagtgcaagcagacaggcacgcacgcacgcagaatcgaactgtatcacgtcgatcgggtgctggatttgcgagaaaagcaaacctgatcagggacaagcacgcgcactcacgcggatcagttcctccacattctagaactgatcgacctgcctacaaccacgagactgaatgatattgatcgatcacactagatgacaaatgagcatgcatgcagccacatattcacacactgatagatacgactgatcaccgatgcatcacaacttcacaagtcgcactgaaactgaaataagtcttcggtacaatgacaagcggtagctaggtagcgtctcctgaatcttctctgcatgcatggccatcgtgacatgtcgaatcagcgacagatgcacgccgcacaactctctactgaacggtcatgcagggtcaggcgcgcccaatcagtgagcacctgcaaaaccaagcacgcatccttgcctcaccgcctttagcttatcacatttcacatgcatgcatagtgctacacagtctcggtgtgctttcaaccggtcggcggacggcgtctcggtgatgccgatctttaccttccatatatcagggcgagcgagcgatcgacccgccacccggcgccacctcaccgtcgccgaccactactgacaccccggcccaccccgccactacgccgaaagacgcacaccacctcgcccgctagtgctcgccgtcgcgctcatctcgacgtacccccaacccgaccccaccccatgcatctcacggtcacggacggctgcctgctcgatcaaccgcgcgcgtgactgcgtgagggagagaatctattgtacggctcggcgcgcgctgcaatcgatcgatcggcagcgcgcgcgtcacgccgcacccacggcgaaatccgcgtaacaatcgcgtcgcgtacgtcgcgtagcgcggttgatttgccggacgaggtgagcacacacgactacacgagccgcgcggcgggcgcactcgcgcacggttgggtgggtgttggtcgttcgatcggtcgccccgcgccttttgatccgcgggatctttttctcgaccgatccgatactcgccccgtcggcagcttttgacggatctttggaggcgagacgcgacgtcggctacgtgggactgggatatttggctggctggctagcttctggcgcactacgcgctcgtgcacatctcgtcgcttgtttatattaaactgaaatgtatcatgcatcgcttttgagcgtgatacaatcacactaaataagcttcttttaataaaaagaacaatcacactaaataatttggggcccttttgctgcaggcagcgggtggggagatcgatcggcctcacgttcctttggtgtgggcgatctgggtctatcatcctgggattgtatataatactaaaaatcttctctgcaaagcaggggacacagtggcacactaaccatatgtacgccacacggtttctttgatctcctttttcactggagttttggcgaggtggaaagtaaagaggactcgaaccttgaatgtttgaactttgaagggactgcttaccggatggacgtgtggcgatgtattttttaactgaaagaaatttggcaaaatcacctgcgcgcattatagtgcaccagtaaaatcgacagatgcctgattcctaagactcggacctaaaggtgcttttgtgttacgcatcgcatccatctataacaggtaacccccaccatttccacgactcccttaaaaagctccatcagctgcttgacacatgacgaactatatcgaactaggattcttttggtggtaattattgttctcctggtggcctttttaagtttaatcctagtaactgacagcggggatggtcatgagggatggcaattcaacatcaatgtcacgaaatgtgatagtagtgcgagctaaagtaactaggttcttatcacctgttgcgacaaatttgtcatgtgataaaacgattagatttggatgatcacagcgactttttgtgctggatacaatgcactagtgacttgcatcatcgatccttatgggtttcaaaagttagcagatatacgtaaaagaaagcaggcaactttttcccctcaagaaaacatggatgatggatatcgatggccagttacgtaccttagattattattcacgaaagacttgattgaactcccgtgaagcggtgaatgcaacaatcagaacgatatgcggtgaagacttgattctctttgcggcccagatgggtggtgacagcccattaagcctgaaatttttgagctgttttcattaagtacttctctcaaaaaaaaatattaagcgctcctaattaacaatgcaatacactggaacagcattacagactctgttttgcagttcagtaggagaaatgtttctccttgttgcttagtaagagcttaagctgtgcaatattgctacagtaatgagtttaatgggcttcagatgttaacactcttcaagacctgggctctggtgtggtggtggtgtgaccaagaacagtcgagtaatatggaagtttgactgcatgaaattttgcaaaaaagtacagcacctagaattcctgaaccaactgcatagacatgtcaagtagaaatgtgaatcaggacctttcaggaacactcgcttagtttgcaagtaatccatgaagtcccagccctagcctccaccattgcaccatcatgcatgaatacatgataaaaacggtgaaactgggaagctgctactcggattgatcgtcgtgtctgtttcgtgatcactgttttttttttcctttctcctggacgtgatttacctcgttcctagtcgatgcaagttgatttccactccgtgtttccgtcgcgtggttctagagaacaagtgtggagtaagaaacactcattgtcttctttggttttatcagtttgggaatgggagcgtgtagcatgacttatgttagacatgtacagatgtactaactctggtttaagtcttggaatatagtcaaaagactagaagaaaacaagcgacaaaactggagcttcaccagtttaaatattccaagctgaagaaggcttaaacgaccagaggttaatttggtgtcatcatccaacaaagtcaacttggtctacagattacaagcacatttttacctatccatttataacatagactttcaccaagggtgtcagggctccaagaaatgccacctgcatccagctctgcagcgccaatctcagcatttcttgctcgataacaattggatataaatgcttattcttcactcatactgctactactatttattggcgccctacgctgtagctgttttgaaactgtccctatacctttcgagggcagagtgctttcccataccacacgtgcacgggggcaaaagccgatgtgccacgctcggcgtaccacgcggttaagcgcgtgtgtaaacacgcacaaacacggcctaagcacatcgattagccgcgcaaaagtacaagggaattaaatttggagtctgcaccctggaaacatgggatcctggatactaacaaacttattacatggccacgcattgcaaggggcatgagaaggaggataacttgaaccggaagggtttgactcagctcacccgagtaggggctagctactgtactacacttgctagtagtaacatcaaacggaggccgcacgagtgggttggcattgggcacagcaagatcgaggtcaagcaagcaagagacaaggaactagccatacctgtcgaggagagaggcagatacgcctggctcaccaggtcagtcaccagctcgaacgaccattccaggacaccatgctacaaagggcagacaactgaagcaataagcattagtaatgtatctacatatgttaacactccaccgtaaaaagtctgtaaaacaagagtgcatgtcacctgcttagcacacaataatttaaaaggtactccctccatacttgtaaagaaaatcgtttaaaacaatgtttaagtcaaactttgggaatagaaatcataaataactcttaagttgttaagtttgaaaatgtaaaaattatataaatagatttgtcttgaaaaatactttcataaaagtatacatatttttatagaaacgagaagtcaaagttgtgttttggagatcgtgtcgctatccaaaacgactttctttacgagtacggagggagtattagcacaaaaacacatctatttgcaagatttttaccgctagttatttgtaacaagatcatactaatgcaggaaggaatactcgtagaaatagaactggtatgaacacttcagatctgaatagaaaactgcataggtttccacggaccgacttttagcatttgaactcagaggtttgaccctaattacccctctataaaccccctacaagtgacctcttccctcatttaattctaagcttcttacactgttgggtgcttggacgacagggaaggaaaacttgggcccatgggattttgggttgcataattttcctaatttaatttcctgatgcaagggacgaatgagagggctgcacttggatccatgcaggattttcgcatcaatgtctgtagaagttctgttgatgggcccaatgcaacaccatatgcacgaatgggcaggcctgaaattttcgtttagttaaaagtgtgatggcaagtggctatggtggtaacttgatgactatgactgttatgaatatacttgtatcttggtatttccatacaagaacttagtgtgtaaaatattgatctggtttcaactaactgtagcagcctagcacgctagcaaaatcagacgtgtaacagtataaccaaaacacataaaggatgccaagttaccgttccttgaagctagaactgactgagcaggttaaatggttaatagccaagaaagggatgcgcctaagaacacaccaggtgggctgacaaaataaggaccctcagaatagcgacgaacagatgggcacaaaacattgtccctacatgacaaaggtagttaatagtgtgaattacaatcctaggttggcagcactttgcacggtaaggagagagaaataataatctagagatgagcagattcttaaattctcaacacccctttacacatacaaacctcttggctgtaacacctcatcgtcgactaatagatcactattcagatagtaaaataatgacttaggttggaattataataggtttgaccattcgcaagcttacaacagcaagagacattaacatctttccaaatgaaagataaataacttttctttgagaaagaaagataaataacttatccagacatgaccataaaggacatcttcagaaaatgacctaaattaataccatataacagaaatcagagatgttgataaaaaaaagtctctatttctttctggaggaattttaaaataatgtacctcagagtgtaaatatgaccaacataagcaaacatgtaaattgttctctgcgatgtttttagacacacagttgctagtgtttaacaattcccagtaaacttcaattatataggtaagagagaaaaggaaaggaatggagaaagggatttttggatcattagaggatgataggtattttttgataccaatgtaaaatatagatgttgtcagagagaattaggctcttagtgttccaatataatactgtactgtacttacttggaatttggaagtctctgatgtcttgggaattgttccacatagttcactatggacaacccaaggaaacaactacaaaaaaataattatccaaatatctaaggagtcagattattctctcaaaggtctaattataagaaatgaggcatatgtgagaactctattagattagatgctaagctatataagcaatgatgcataagtacagttcagttaacttagtgtaataagagagattgctaatcccaaaattactgctgaagttgtacagctcatcgagatcctcgtcatggagtaaagaccaaagagaccctgcatgagttcaacaacaggtgagggttttaaaattctgctataagaactgtacctgagtgcaggcaaaggtgcgaacgacaagccaaataaaaaccctacaaagggagcaaccaagcgaggagggttagctgaagtctgaaacttaaggtcgagcttcttctttctaacagcacgtgatagctgtctcatagttttcttgcaagtttcagttcagattaagaatatagctcgctcttttgttgataagaaagcacgtactgctaagagctagctttgttcaggtctggaggaagctacagttatatgtaatcttatgtataattgttccttttctatcttcagtaaccagcagaaaccaaaatcttttaggtatagccattagggtttgttagctcgtaaggtcttgataaccagaagtaggtgagagtgagcaccgtttgagctagctagttaccatccaccagtagtttctgtactgtgttgatatggacgagatgaggagtagtgacatagagaagcaagatgaagtcatgctacctggcttcaggtttcatccaacggatgaagagctcgtcagattctaccttagaaggaaaatccagcagaagtctcttcccattgagctcatcaggcagctggacatctacaagtatgatccatgggatctcccaagtaagatttgttacttccattttcattcttttttccgttctctgcacagataaataaagaactatgaagcctttctctttcaagataacactaattatatgtttcctatttttactttatgactttcatggtgcatgttccatcatgtttcctatttttactttatgactttcatggtgcatgttccatcatgctgagacttcgtatcttagtagtaatagttttttcttctttttgccaccatgttgaagtcgaactctaaactttttgcatgcatctttatttagttgtctctgaggttttgataaggaaataagaaaagtaactacctaagagttttcaacctgcctcttaagcgctactactataatgtccattcatcacgaagcccatgcagttttagggttaagcctcataaaacatttagagcaagatttgcaagtctaccaagctattaatgtcatgatgtattctgagatttggctttcagtagtgttaatgtggtataattgatttacaagtatcacagttgggctctcaagactaaaaaggcatgcggatagtaaatagattatttttcatgtgatgcatatgccttttatcagtcagaccagttagcctagctgactagctcacgttttgttttaagtcagtgttacacaatagacaccatttaacttatttctagtcatatttacttaacaaatccttttttcaccgtgaagagttagcaagtactggagagaaggaatggtatttctactgcccaagggataggaagtaccggaacagcacaaggccaaacagggtgactggagcaggtttctggaaggccactggaaccgataggccaatctactcctccgatggatcaaagtgcataggcttgaagaagtcccttgtcttctacaagggcagagcagctaaaggcgtcaaaactgactggatgatgcacgagttccggctgccatcgctcactgacccttcattgccacagaagaagccactcgagaagatcattccaccaaatgtaagcaactggcatgctgcaacatttgaaaacaaaaaacttcaaaccttaacacatatgctacaaaagtagcttaggcatagctaccaaaactggcactaaggtagatgatctgagcaatacatgtctgcccataattacaatgggaaaacttgcaatataaactgcaaaaggcctagcatatgtagtgctttccgagctaattcagtatgacaccaacaatttcatataccatttccttgtgaagataagttgaatgcactttttacctgaaaacactgccctaatcttattcttcttttttcttatcatgagcaggattcctgggcaatctgcaggattttcaagaaaaccaattccacggcacaaagagcgctctcacactcatgggtatctcctcccttgtccagcacaaatgaagcctacactgcccctgtctcgcagaccacacagagaagtcagcatacctcagataacacatcatcagtaatgaccgatgccatctcctccaccatccagttcaccggaagtagctacttgccttcaacagttccttcatgccacaacccactcagcatgattgacagcaacagcaggccagatgcatctgtacctctaccctcaccggttgcagagcatcagaccatgggtatcctctcagcaatcccacttgatattacagctgggattgacattgcatccatggttttcaatgcatcatccttcacactcccaaacatggatagaatgactgcaaacatagagtttggccaaccacagaagtgcaacagcagcagcagcatgaccaacagatgtgtggtcgacatgcctgatgttgctaacaatatcaacagcggtccacggtccatcaacttcaacctgcaaggaacactttctgatgactggagaatgaccttgccatgggaatcactcccttgcacgacagaagtctcaacaaatttccagtcaaccaagtgctatacttaggtttctagtaatgtaggtttggttttagaatgcggtagtgaagattagcatctacctctgtctgctagtattactgttagcatgaagaggtattcgaatttcgttctgttaacagtgaagctaacagaattaggaagcaatatgctactagtccacaatgtaggatgcatcatggaactaattacctccttatgcagtgcaagagtggttgtcgtccgtctcatgtgtaatcgtagctcggttccaattttgtccatagttgcatgtactgcaaaatgcgtagggtattagcaaatactcccctgatcagctgattgtcttcatttcttcgtttttcctagttctgaacattgacagttgttgcctttttggttcacataccttgcgcacataacacctcataaatcgaagaatcgatagcagacgcaacaagagggatcctcgctgcagtgatggtgaggtccccgtgcactccgcccccgtcggacttgaattctgaattagttggaatcccgtacagattgggtcacttacaaatcctcgaggtgtggatcgtgctcgcgatcgactgaagcggcgtgcggcgagccgcccgtccgtggcgaagtcccgctgggcattccgccgaacgggtggcgcgcaccgccaccaagcggcactcccccggcggcggtcgccgtcttgtggccggatattagcccgctactgttccttcacgcccaacggctggcctgccaccgccggctgcgagttcacggcgcctcgccgacatcgaaaccgcgatctccatggagccctcagccctctcgtttccgttttggcgaggcggcaggagagagagtagagagagactcatcaggactgacgtttcgtcgcttcgacagttcgacctataatcggcccggataaaaatctattcctgtccagttattagtggaccaaatgggttgacctttgtctcaaactaggcccagtttggttagaatactgggcctgtcgtgatggttgggcctaaatccgaataggttatctgcatccagattgacagtccgctcgttcacactgtcaagatatcggcaactccaacaatattgttaggcaaatcatcgacatgccaccactagccatgatagtgcgaccaaaccaaaaccaatattttaacctttttttccttagttgcgacacacaaaaaaaaaagtcaatgcaccctcgcaacacccactgacatcgggctaggataacccaacaatcacattgtcaaaacagaagacggtattctgcattctgcactaacatggttggccgtcgtcatccggcgccttactggtcatcaccaactcactgctcctctcagtgtgccactaccggacacactgaccattaacccacttcaaatccgatcgcacaaggaggttgggagaaaagccccacatgtcagtgacacggccagcctctcacgtcaaaccgttgaaaccccaaatgtacagtctatgagtcactggcagaagggcccacgagaacctaactaaacccacctcgccggcgttagaaagcgttgcgcgcccttttcctccgcatttcgcctcgggattgctcgacggcgagcgattccgacttcacgcgctcccatggcaggcggcggcggcggcggcagagcttccgcgcagcggcgggcggcgctcgcggcgctgatcacgctcctcttgcttgcgtccctcgctttcctcctgtcggcgacgggcaccgcctccgccccgaactccgcacccttccggctggccgccattcgccgccacgccgaggaccacgccgccgttctcgccgcctacgcggcccaggcgcggaaactcagcgcggcctccgcctcccagacggagtctttcttgtctatctccgggcatctcagctcgctctcgtcccgcatctccctgtccaccgtcgcgctcttggagaaggagacgcgcgggcaaatcaagcgcgcccgctccctggcaggcgccgccaaggaggcgttcgacacgcagtccaagatccagaagctctccgacaccgtcttcgccgtcgaccagcagctcctccgcgcccgccgcgcgggcctcctcaactcccgcatcgccgccggctccacgcccaagtcgctccactgcctcgtcatgcgcctcctcgaggcacgcctcgccaacgcctccgccatccccgacgacccgcccgtcccgccccctcagttcaccgacccggcgctgtaccactacgccatcttctccgacaacgtgctcgccgtgtccgtcgtggtggcctccgcggcgcgcgcagccgccgagccggcgcgccacgtcttccacgtggtcaccgcgcccatgtacctcccggccttccgcgtctggttcgcgcgccggccgccgccgctcggcacgcacgtgcagctcctcgccgtctcggacttcccgttcctgaacgcctccgcctccccggtcatcaggcagatcgaggacggcaacagggacgtgccgctgctcgactacctccggttctacctcccggagatgttcccggcgctgcggcgggtggtgctcctggaggacgacgtggtggtgcagagggacctggccgggctgtggcgcgtcgacctcggcggcaaggtgaacgccgcgctggagacctgcttcggagggttccgccgatacggcaagcacatcaacttctccgaccccgccgtgcaggagcggttcaacccgcgcgcgtgcgcctggtcctacggcctcaacgtgttcgatctccaggcttggcgccgggaccaatgcacccagcgattccaccagctcatggaaatggtaagctagctcaccgcgatccctctcgatacggctgaaaatgcaattcgctttcggtttttttgagcttgatgttgctcgtgttcgtgccatgcagaacgagaacggcacgctgtgggatccagcgtccgttctgccggcggggctcatgacgttctacggcaacacgaggccgctggacaagtcgtggcacgtgatgggactcgggtacaacccgcacatcaggccggaggacatcaagggagccgcggtgatacacttcaacgggaacatgaagccgtggctcgacgtcgccttcaaccagtacaagcatctctggaccaagtacgtcgacaccgagatggagttcctgacattgtgcaacttcggactctgatctttgctacgatttcaatggtaatgatcagatgtaggttcagtcgtttctgcctgccgctgttgttgcaacttgcaaaagcagacgagttaatggctctgctccgctaactgtattgtgtttgtcccccttgtcatttaggctgtctgaactgaagaaatctctcatgtattatggtactagtagatgatatcccgttcattaccgtgggcattttgattttgtaggtattacctaaaactttctaacattgctcatattcatacttagcaaccatatatgcagagaataacggaaatcaaattagaataatggttgtgctaaaaaaatagaataatggcgttatatttttacaagactgcacaaattacttccacccggcgtcaccgttcaccaccctgcacagtcttgttgtgcacccacttggcaatatattttggggcatttgcaaatttgccaccggttttttgaatattgcaaggataccactcgaatgacagttctagtggcatttttgcaattttctagtggcagttttgcaataacgattcaaagtagtggtaaatttgcaattgccccatatatttttgaaaaaattacgaattacccctctgaaatagggctgtcaaaaaagctcgaggctcgccgagtagctcgagcttggctcgtcctaggctcgatttgagctcggctcaagctccaaacaagccgaacccgagcctgagcaaaagctcgcgagctttacccagccgagctcgagcttctaccgagtctaggtgagcttgactgtatataatttatattacatgtttaccttattaatataataaactaatagataaatatatattagtatctatttatacagtaaattagcatgtgttagcacaatatatttattttaatcattttctactcttttattagtgtgattagctagaaaataattatacttatcaagagattatcattaaaatatatattatactacttatagccgagctcgagctcgaactgagcttgcctaaaagctcgaagttgcaataggctcggcttgagctcgagcttgggcagacgagttcactcgagtttggctcgttgacagctatactctgaactattgaggtcgttcgaattacacccctaaactgcaatatcggatattacaaaccctaaactcttaaatccgaacgaatcacccccccttaactcaattcggagtggtttttggtctatatggcatacatggcagcctagtcagaaaaaaaaacgaaaaaaaacacagtggggcccagttgttagtgcatcttcatttcctctccttcctggcagctcaatcccaacaggcatggctccggtgatgtgggccatacggtggcaggaagaggaggcgatgcggcggggcgcttgcagaggccaatggcatggaggcggaggcgaggaggttgggatccaagaccagcaggctacgtcgattcgtggtagcgcagaggcggcgatggagacgagctatgcgacggggctcgacgtgccgattgcgtcaaatccaggcgtgtcggagcatgaagcagcacatcctcctttggcaaacgagaaagagaggaggaagagtcagagcgggaggactttggagctagcggtcgggggcggagctcaagcctcagggaaacggcctcgagatcgacgttccatagcttcgccgacgtcgtctaggctcgtcggcgccagccaccgcagaggagcttcgcctccaagccgctggcatctacaggcgccccgccgcgtcgccctgtctccccgccaccgtatttcccctaccatggccgtctccaccgccgcaccttcgccttcgaccgcgtcgcccccgccgccggtcgtgccgtcctcgcctccgcctcgatgccgtcggcatctgtgcacgttgctgctgcccctctcgatctttctcacgctttgttagccgcgcctagaggaacacaagattttggtgtcgctgctgctacgtactaccgccgcttgccatcttcggcctccaccgacgggcacctcatccttgggctccaccgctggcgcgcggctcgtcctcggcctccgcaacatggcgcgccgctcatcctcggcctcccgccgctcgcctcagtgcgccagatacggggagagaggggaagcggcgaagaggaggggggaagaaggggaattaggctgacaagtgggtcccaccatgtttatttgttttggctaacaaatgggtcccatatatttcttatgttttgattgactagactgccagtctaccatgtatccggtttgtaaattttagggttaaaaataatcggtattagagttcagggttaaaaatcggatgcgaggggtaatttgtaatttttccaaaaattttagcaataatatgggcaaaaattcctgttgggcctgggcgttgcgcgttcaccaccgtcggaagcccgaaaaactcttgctaagtggtccatgcagcccacctgtgtcaggtatagaagaaaggaataagttcatctaaggtctcttaaattgtcaacgaatccgattttcgcccttcaaccacaaaaccagatacaattggtccctcaactatcaaaaccggtgcatattaggtccctcggcggtttcgatggcggttttggctgacgtggcgcctacgtggctaattttgactcggtcttgatctgacgtggcactgatgtggcgcttacgtggcaattcgatccgaaaaataataaaccccgtgggacccacatgtcagtttcacacacaataataataataatggtgggacccacgcggaccccacatgtcagtctaattaacccctcctcttctgcttcctctctctcctcctccccctcttcgtctctctcttgcgctgggtcattctgattctcctcttccccatcttctctgtcttcatctctctcccctctcctctctctcttctcttcggttcacgggcggtggggagaggacggtgtccggctaagagaaggggcgcggcgcggcggctggtgggagggaaactagtggagagaagggaaccagcccggcggcggaggcagtgccgccgcggccgtggctgcggacgacgtcgacgtcgacctcggcatctcggcggcgggatgaacgtgtcccgccgaccggccgacacacgcgcgcatcctcggaggcggccgtccacgtgggcgggtgagggggccacctcgccggcgggagaggggagaggcggccggctgcaaagacgaccccagtgatgatgacgaccgtgcggcgcgcggcggaggccgatcccgtgagcaggaagctcttcgtccacggccttggctggggcaccagagccgacgacctccgctccgcgtttatgtgcctaatcatacaaaggtagaagcaatagcgactagtactacctgactggagtatattttgcttcgtcatcatcatttgcttgtgttatgacgaggttgatgaatgaatgaatgatcattgttttgggcaagaaaacaccgttccggccggattgacgaggaacccatatcgatccgctcgccgtggcccatggaaacccaacaggagatggcggcgctaccttccgctgccggcgactactaatggtgggtgatgctcgagcacattgacgaactcgaggtcgacgacgaggactccaactacaactcctgctccgccgctgccgacgacaccgccaatcccgtgagtccatgatgacttcgctcacctccgacggccacgtcgtaagagtctacttccacctcgaagcgcccccggcgatgtcacacctatgcccctagcggtcactcttatccatttccgccgccgtcgtcgccggccgcatcccctagcgcaagagagagatgaagagaggagagagaggaagcagaaaaggaggggtgagttagactgacatgtggggcagcgtgggttccaccattattattaatttttttatgtgaaactgatatgtgggtcccacggggtttattattttcccgggtcaaattgccacgtaagcgccacgtcataccacgtcagatcaagaccgagtcaaaattagccacgcaggcgccacgtcagccaaaaccgccatcgaaaccgccgagggacctaatatgcaccggttttgatagttaagggacccgttgtatctggttttgcggttgaaggacgaaaatcggattcgttgataagttaagggacctttgatgaatttattcctagaagaaatccgcctccttgtagccaccgctccgtcggtcagttgaaccggtctcctcgagcgctcggaggagcggcaggcgggcgcctctcgatctcccccctcgcgagtccggagtccggacggggaggcgcacaactccaggaatccaggtgctccctccgtccctccccttctcctctggtaggcgccgcgcaactgctccactcgtgtagcgtagtcgcctcgctgctaggaccgccgcatcggggcccgggacggcggaaatcaggcaccgacgacgtggaaaacttcggtgactggtctgtcacagtctcggggtcgtccctgttgccactgaatccgatcttattagtcgtccccgttgccgctgaatccgatcttattagtcgtccccgtcgccgctgaatccgatttataataagagtataatagattggggacatctctcgtaagtcccaacgctaatatcatcgcgacgcgcggtcgtacgagtggtcgtctcttactttttcaggtaataaaaagcgcaggcacccctccccttatccaggtccggatttgggtttccctcaagttttttccgttgttcaattggatcgaattaaacgatttatgcccgtacagggtttggtttgagtagaatcatctgtggtggtatattggtattctatatactttttttttgatttggctgtttcgatcagccatggtgaagacgtcggccaacccgaatgccaagggcaaggccgcagcttcgtcctctggtcttccgtcacccaagaccacgcccagaggggtgaggcctaaggcgtttaagaagaaggccaaggccgatccagagatgcagaaggtggcagctgcggaagccgccgccactgctgagactgcatcggcaccccctctgaagccggctgaggtcagcccagcggcagcggtggccaaggagaatggaggacagaggatgagcagaaaggaaaagacaaagatgaaagagggggaccagatgaaggaggataagaaggggagaataaaggggaaggaaaagaaggacgataaagcgagggagaggaagggtgaagctgggtttatattcatgtgcagtgctaagacaaagccggagtgcttccagaatggtgtgtttggcttgcctaaggggaagatcgatgtggtggagaagatccagccaggggcaaaactgttcctctatgacttcgacctgaagctgctctatgggatatacaaggccaagacaaagggagggttagatcttgtgcgaggcgcgttccatggaaaattccctgcacaggtaactctttagtctgtgtgttcctttcctatgttttatgttcctttcctatgctttaggttccctgcacaggtaactctttagacttattgtcagtgcgttcctttcctatgctttaggttccctgcacaggtaactctttagacttattgtctgtgtgttcctttcctatgctttagggtattgggaggacctggtctgctattagagcaatacaactgtcttgattatccaggcaatataattaaaatttaaaacaacaaatcagaactagaaacatttcctcaggcttaggggtgtgcaatgtctaataacgaataataatttcaggtcagaactgattattgatgtttgactcttgttttgttgttctgattggtgttaataattggaaatttaaccctaatggaacggtaaatgattgccaaggtattttttctagcatgacattgtggctatttaaatggtcaaataagttctatgttttcaaaaaaagggacaatgatcatcggtcatcattaacttaaatccccatttgtacacatgtttttctaacctttttaacataattcgttagcccatatgttattcgttcagattggtctatcatttttgtaagcaagtgtcatgcaactggcactaaaatacaaacagctcaggataaactagtcaacttttgtcatgagttgatttattcttaatacttgttgacaacttgagaaacatgattgctcatttttatgggggagtgcaacagttatgcctataagttaagctttaacaccagtttggaatatagaatgtggccacatcctattgttatgtttttgtaagacactaaaatttgagaaaattttgcatgtggcagcggctgtgtcattttcttttttgcatgccatcttcaaaactatatttttgtgcttccacccaaaatagcttatgttcttatccatgacactggtgacttgttggatccagccaacaactaactctgaaaattggtatctttgttatatgcttattcgactattcaattcttaagcactactggaccaactaggcattgtctacatggaaatcatcccacacttgaaacataaaaactgcaatgacccacaatgttcctaacaacggtagtgacaacgtgtttttgccattgctacccttgttcatgtccatatgaccacatgggcagggtcacttggtagggaacatgcaatgggcaatggcaaggttatttgtactagtttttcttttctttttggtggggatctacagctaggtcttacaggaaagaatcgacatattgtccacaaacaaagttaggtggcaacaggaatgctctacaaggtcgatgatgactaacaagctatgaggaggctaaaggggatagtgcatggttaagcctagagaggcctgtgatgctctggctttaaggctcaaggtgatcggtcagtgatcttggtctcccataaagtggttaatggaacatggctattaggctgagttgaaggtgatgattgcgctcaaactagctaggaacacgtaatgggcgcacgcctcgccctagtggtgaggttgttatatgcatttgtaaatagttaatctgtataggcggtggtgtcggagatgagaaattggtgcatcatcattaggtaagtaaatgctgatgcgagttgaacgtgatgattgcgctcaaactagctaggaacacgtaatgggcgcatgccttgccctagtggtgaggttgttatatgcatttgtaaatagttaatctggacaggtgctggtgtcggagatgagaaattggtgcatcatcattaggtaagtaaatgctgatgcatcaaaggctcaggttgggaagaagagagatttggttgtgctaaatgtaggaccacatgggaatgtagggaatgtagggcattttgttttttcccctaactctttcatgctcaccttctcaatctaattctctagtggtataggaggtccaatctcctttgtttcgacggcacaaaaaaattggattatataatggcatatgcaaagatttacaaagttttaatggcgtatgtaaaactctcttaaaattattatttggcgtgctagcttttaatttcatatacacatacattttattttcgacaaattgtacggtctgatcaaattaaagaaaatataggaagatgtagtaagtactattgaagaacaatgcaatttagttttttaaaaatcgtcaataacttactgccaagcaatgatgttgagccttacctatccgaacttcgaaaaatttcgacataactttcaagtttagccattccattttattaagtccttcacatatcgtaatgcctataatgttgatacctcttggctcattgatatctccatctacttttctttttccctcttatcctcgtattttattattttacaattattgttgtagctagcctttaaaggcatgtttattttatattttagtctaaaaatgacttaacctagaattgtctctgcactatttgtgtatggttgtgatacatcaacctgaactttgagaacttattttaattccttactaggcattgtttgaagttctaattatgttagttgaagagtaagcgacgaagtttgtttattgagttaactcattccctacttcataatgctagaaaggactatcttaatcgagttcatttcctaccaaactaatctctcaattgagtttattttctcaaaatttgatcaaatttctccttgggttaaatagaaactaactagttaattgccttagttgtaagttccaaaccttaattttaccaacaattagtttggtaatttttctccaaccttcaggagcataaactatatgtagtattataaccatttgggccttttgatttataataaacatcttagtatgtccatacagtcctagaaagaaactcttttaatatgtttgtaatgatattctttgcaagaaattccatgtaaggagtacgtatggatgatacatatgagaatcggggaaccaagttaagttgcacacgaacttcgggttatcctgattcaatatagtggtgttttttgtgttttactagagcgcatccatgaatatattattattttctaaagtggttgctaaatattatgtaccttttgctttacaatctacattagagttctctatgtaattctaccatgaagttcttcatttcttatatcaatctacatcaatataataatatggcctaccagagtggtaggtcattctccctttttcaactatttgtgggaattactatattttaggtaatatagagtctttctttaacaatcatactaatatatttttcatcgatgatagacactactccctccgtcccaaaatataagcatttttagtatagtgataagttaaacattttcaacttactattaatagcaaaaaaataaaaaaaagatcaaacatgtaaaaatgatgttactagatttattattaaacaaactatcataatatgcaacttttttttatttaaaacatcttacttttatagatattgttggtcaaagtagcatctcggagactgtgtcagagtcaaaaaaaatcttatattttgggacggagggagtagataaaatcggataatgtttaagggtgacactattgtagtccaactaacttgtgtacgtgatataggtcaaatttaaggttgacaaagattgccttcctcttccggagagtagtttcaagcatgccattaaggagaactacaattcaaagggaaagttcacccaggaactcagccttaaacaagtgagttgtggagattcttctatgtagttttaaaagagtgccaaaagaaaattaaattgtaaacatcaagttgtgtgctgatgtcataagctatggtgctatcttgtaggttcataggttgttagaactattcaagcctattagcttgcctcaatcatctattcaatatgttaaagaaaggcatcgacgattggatgtctttgagggtcgcctaccacactatgttgaaggaaggagactgccacgacatgtcgaggaaatgcatcatttacgacatgttgaagaaaggagattgccatatgaccatgaagaaagaagattaccgtatgaccatgaagaaagaagacgaccacgatatgttgaagatattcgtcatccacaatttcttaaagaaagacatgctataaccgactctctgcatgatccatttcgatctcggcatgtgactcatttaccagagcttcaacatgctcctcccacatactatcatcatgttgctcatacttttgacgaacggtaccatcaacctcaagttgatatcgtgtatgaacggtgagtgctttaggccctgtttgtttcagcttaagattattgtaatctagattattaaatcagattactttaagctggattataataagctaacataaaataagctacgagttgtttgtttctctggattattagaggcatctaagggtagtgggtctttagccactcaataatctggaaaaagcttctctagaggagattattggattatagtaatctggcttatatattataataatctagcataataatctacttgtttgtttcagcttactcctaataatccagattataataatcctaagctgaatcaagcagggccttagtcatctcttgaattttctaagctaagtgctaattgattttttggcaaacttggttaaataaatctcactcattattgaaaacaatctatatgatgagttgactccgcgtcctttcttgttagcttgagctttttggatgaataggctatatatgcaacttaatttgatattagggccaacacgtcttaaagttattccaagtaagcacagtaagttacaaagtgcaacttacttctactccactcaatgcatgcgtggatcctacatatgagggtgtatgttgaaagtatattggattgctcacctttcctcatcaaattaagctttgtaggctagtgcatgcaacttatacttgggtccaatcctagttttgggtgattcttaatatttcttaattgaattgtgagtagaaatctaaaagtttcttaatatattttgttcactatgcgattgtgctttgtgttagttgacacaagatgacactatggcagatttgctattttagtactctagctttctagttggtttattagcaaactatctaaatttgctcctcaccatcttcatgatttgttggcctctatgctagagatctgtaaactatataatgatgccagttatgtcttgtaacttgaaaaacaagctcaatttccgcacaattacacatggactagattaaaatttatttggaatgtacactgtattttgtatacaactatattgattaatctacacaattgtaatttggaccaaccatggttgagaaaatagatatttctctttttcctcgattaatatagtaatttccatgccaacaggaaaaatgtggtggctccttttagcttccgcttagcaacataattgagaaatattttaggtttttccaaacattcaaattataattgcgtcagtcaaacaacttttttattacctaaattcgttgacatgagagtgaatggaggtgtaaaactaatttggataatttagagagattgttgatgcagtcattgaattttgggactttccagctcgataaaaaagtatagaggcgttgaactaatagtaaccgtgtagataggagattcaatactgcaactcagattcacttcgcaattcacacggaactttctacccttgttctacttgcactctccacatgttttgaaggcacatcaatacttttagctaactgaaaaaacaaattattgcaagtttagcaatcaactaagtagtttttttttcaagtttcaattccaaggtaccacaggatggcaagtttatggatctcagttttctactgctggaattcattgtctcaaaacctgtccatgtttaattctagaattttcagcaattagctcattagctgtacaagacaatatctataaaaggaaggaagaattgactgtggtgtattatcttaaggaggctgaggaaagttgttgcctaatgagtagggtcttactattgacatataagggagcatagctttatctgtcagagtgctgatgattgttttagtgatgtgctagaaaattgtgccttcctgttatagctaactttgtcgtgctaattttggctgctaattttggcttctaatagcgttcgttgagttagttttctttgaagttatttacttatttgtaagtcttttgatctgttttaagtttaatgaatttgtaaccttttgaatttcagttctgcccccagagctatagttgaggctactgacagggaggccttcctcgcaagagattacagagtgccagaagagattgtcgcacgctcggatcatgtggatgagctctaccgttcttatagacttgccactcgtgcaatggatctccatcagggtccgtcctatgtgacagctgcctatgagaacccaggacctgcctacagtgaaagcatccatcagatgcctgtttcttctacaaggcctaacgtgcctggtgcgccggtctcctccctgtattcctttgctggtgcaccagcatatcgatgatcaccccagtggcccagtgcactgaaattggccccagacaaccttattgtcagttggtgatggtgtaggtactggcatcctggtactatactcctgctctcttgaaagtcaggctacaagttaatcgtacttgttgctgcagagtatcgattcctttttatcccaattgtaacatagattcctttatactggatcatgggttttatttcatcagatttaatgaacaaaataaaatgtgcggtatttagctgtctgcctagtatttagtttgtgtcgtgaaagggaattcattatcgtcctgccctttcattttttatatgtggtacgtcttgtcttagctaaatgatcctgagatcgttcttcagttgtttggctctaacctggtctgctaaagtggttatgcgaaggaatccaggattcgctcacttcgcttagaaacattctgtttcgattgattttgcctcctgaagcgttgtctagcttttcatgtcttgcgtaggcaaagagaaactttagaatcgacatgtgtttactggtgttccaagccaggtcttggaaaatacgagatggtgtggattgagctctgtatacgtcccttcaagattagcatcagtaattcatgcgcttagtggcaccagtaaatttattataaactattttaaaaaatgtacagtaattcatgcgcttactggcaccagtaaatttattataaactattttaaaaaatgtacagtaattcatgcgcttactggcaccagtaaatttattataaactattttaaaaaatgcaatcaaaccatagatcacacagtccaaatcagagaagaaaaattagccaagttatgtttagctgttcttttcaactcgtacgaaatttccttagattttttgcacgagaagtagaaacaggcacatgtgcccggttcgtcgcacgaacccggaccacacgctcccctttgcaaccaacgcccgtccccctcccctccccaccttctcctccctcgtctcctctcctcgttcggaccgacggcgacggccgcctaaattatccatacctcccctccgccgtggccaccagccacctccacgaatccaattccaacatctcctcctcctcctccgccgccgccggggggatccgcgctgcgccgtggtaagcccatctctctcccggccttcccggctcgacgttcgttgtggggggcgtgttttgcgcccgaggattggtgggttggcggggggatggggattggggcgtcggacgagctgctgggcacgttcgtgccgatcgccgtgtactggctctactcggggctgtacctcgcgctggacggcgtggagcggctggacgtgtaccggctgcaccccagggaggaggaggccgccaagaacgtcgtctccaggggcaccgtcgtcaggggcgtcctcgtccagcaggccttccaggtcgccgtctcgctcaccctcttcgcggtaatcctcctcgccgccggttatctcttccagcatgcgggcacccgagttattggttggatgaattgtttcattttttagctttgtggtaatctgatgcgaaacatgcagaatcgctttttttttattattattttccttcagaagtgcagaagcagagatgcaaatacttggggtgaattttgaagtaaaataggcaaattgttgtacatgcgtcttgattagattgttttggagaacaatgaagtaaaaattgcttcacacgcatttcgattagattgttttggcccaccatcaccgtgtagcactcaataaatcaatctttaaacctcagcatctgtgctaacatgcggaggataggagctaatcgcatcatgtattaagttttggtctgtaggtgtgttgtttggtaggatagctttggtgctacttaaaatacattttttgtattcacttcgtatggaaggaagctgcacataactaaaagaagaagtcatttgaatataatgagtagggagcaaagttatgatacttgtgttgattttgcttctgcgttgcttatcaagaaaatccgtgctttgttgctttctgactaagtagaaaaatatatttatgagatggcagctgctctatgctgattgaagtatatcaaaatggtgtccatggaaaataaactgatatgcatgaatgtccagttgtacgaatgcttatgtgtcttgaaccaatattgtatcttgacatttcttttggagtttacctaatagctttacttgtatggttctcaaactgttgaacttctatcgaactgcaggttattggtgatgaaagtgatattgaacagaagcaaccttctgcccttgtgatattgctgcaatttgccattgcaatgttcgttatggatacatggcagtacttcatgcacagatacatgcacatcaacaagttcctatataaacatatccactccaagcaccacactcttgtagtcccttattcctttggagctctttacaaccatcctcttgagggtcttattttggacaccattggtggtgctctctcattcctcgtctctggtatgacaccacggacatccatattctttttctcgttcgcaaccatcaagacagtggatgatcattgtggtctgtggcttcctggtaacatcctccatgcgctgttcaacaacaacagcgcttatcatgacattcatcatcagctctatggaaacaagtacaacttttcacaaccattttttgtcatttgggacaagatacttggaacttacatgccttactctatcgagcacagaaaaggaggagggtttgagtcacggccagttaaactcaacatagcagagcagaccaagactgattagtgtattctcggtccactactctcggctctgtggtaccctgatcttctaactacactgttggtgtgaaattatcaccttgttcgtatagtgatgtttttcttgttctctatattcttcttctgttaccttttgggaggggttctccttgtaccaaggtatagtgagtaaattagtgtactatatcaaagaatactaaagcactaagatccacttggatctgtttcctggagattggctgcatgtattgagcttacatgcatgccaatgttaacaagagaagatgatatttacactgtatgcagctatgcagtaagccagtaacttttgtggtgcattcgatcgttcctttgccgtagtgcacagatgcagtattatctgtgtcactggtttgccttgagtattcttttgtactactagtttattcactggcttacaatcagaatgctagattagtaaactacccagatgaaccgcgttgttttcacagtactgcttctaagcccttgtttagttttcaacttttttcttcatatttccaacttttacatcacatcaaaactttcctacacataaactttcaacttttttcttcaaacttttaattttagtcaaacttttaattttggcgtggaactaaacacaccctaactcaagtttttatatacgaaatctttcgtgcaaggcagctcacacacttgtaattccacttgtagtatcacgaaaagtagttgcgaaaactgtagcaatgttgacacaatcaagttcaaaatttgatccacacattagggaaaaaaagagtaatcagttgtcaatagtcaataccaaaacttttagtactactggtatctaaggctgtgttcttttggaagggctgggaacccctcccctccacatggaaaacggagcgatagattatcacatgattaattaggtattagctatttagctgtaaaaaaacttgaaaaataaattaatatgatttttttaaagcaactttactatataaattttttacaaaacacgtaccgtttagcagtttgaaaaacgtgcacgcgaaaaatgagggagaagagttgggaacataagggaatacatacttcagcatgctttatccctgtagatcccttttccaaaattgttcagcatgcaacacttaggcagcgttcgtttggaggacattgagggagaaagcacctcgttttccgcacgcacgctttccaaactactaaacggtgcgttttttgtaaaaattttctatagaaaagttgctttaaaaattcatattaatccatttttaaaatttaaaataattaatactcaattaatcatgagctaatggctcacctcgttttgtgtatcttctcaatctcctcaatccccttcttctcaaacacacccttaggagtcaggaccattggcgaagggcaacgatctatacaacactttgaggcccttttgaaacgcaggcaggaatggtaaaacattaaaaataaaaaaaacacatgattttgatagaatacatatacaaaacaaaaacaaaagattaaaacacatggaaaacacataggaatgaccatttcgatacgtcggagtaaaaaaaaaatgtcaacagatagaatgcaaaagaaatgcatgaataagatgaaatataaactcaaaaaggaaaatacaagttggagcacttgctaactatcctctaaaatttacatgtatttagccattaccagagaattctatatgatttaaaaagctctaaacctttgtttcaaaatgccaaatagaaaagtttcttacaaattggaattctacgaaattcccgcgaaatttatttcacaaaggaggccttaaccagatgacaatatttgtttctttcttctttttttttttgggtaaaggtttgcactacactctacacgtctacacgtgacgaggccaatggctatctgaattttaccggaagagagcaaagcaagagaagagagggcaccaccagaaggggggaaaaccgccacctctacgcgtcgccggagagcgcgccggtggcatgccggagcgccgcctaccaatatccactccggcggcggccggaccccgccgtcacccccgacggcagcggcgtcactgccgcctactcgtcctcccggccttcgccctcgcgcttgtctccctcgcctacctctccttctcttcccaccccaatctccccttccatggtaagctgcgcaaatcaccctgctagagatccgtagttttagggcaagaactatcgttttgcttgcaatgtagtaattgaaaagcggggtgatagtgggtttgtgtcgtaacactagaatgttttctcctcatcgttttcaataattcgtgggattgggtggaataggccgagaagcattctcacctgaagtgtgtaggaagttaagcgtggcagaaatgaaaaatccaaaaatatgtttttctgttgtcatcatgtcaaatttaagcatgtgacacatttgcattataagataggtttgggagtgaacttttgatttgttaggggaaggagaagcggtgtaatgtttgtatgcaacagtactagaaaagggaatggactgtgacgacaattatgtaggcccttaggaaactcaccaactttaaatgacgacaaacagattctttcgtcgataatgttctcatacttctctggaatgaagtttgatgctatgctctacagcaaaacatcatgatatggctagtataaaggatgttaaggagagaatggatcaaagacaaactctcgatgctaaggttaaggcaaatttgtctatgtgagttcgtcattttttttcatatgtaaataatatctatctgtgtgtatttacattcctttggctaccatggaacaacagtcataggattaacttctcatgtcaggactaaagttgagtcggaacccttcaaaagacgaaagaaatctcgcaagcattgtaagagatcttctctactatattctctacatattgagtttcctaaaatatggtactttttaatcaaatacaataaaacatatcttatccaactttatcctagatgcactttgttctaaacagactagatagcatatcttttgttctcttgtatctgccaaatgcctagccagcggcaagttggttgtagtagtactacctaatggatcagaatatctactactttgattaatgtttcttgttactcctgggttatgacatgttgagtatattctataaaaaatgtaaaaaaatatgtattactgtaatatattttatgaaaatatgatagtatcatttttcacataccaattcaaatagttttttatatattggtagtcaaaattagacaaggttgaccacacattttctttatatttctgaacagatgtatagtacaagttagcatcagttctggttcttacgactcatataagagattttctagtcaattctactcatatgctaaatgcagacatgaatgctgttcttttttgtttattaaatttgctattgctttcttccatcgtgcatactgctttaatttatcaaatgaatttttgcagatgtaccatgtcaaattgagtttttgccatcagttgatgatctagtggagcctggtatctacaacaactttacagggttttctttgaactatatctcgaaggagaatgtatcatctagtaatggtatttttgaaccattgtttggtggacaccagagccttcaggaacgagaagagacatactacgcaagaaaccaaaccctccactgtggttttgtgcaaggaccagaggattaccctaatactggatttgatctggatgaaaatgacaagatttatatggcttcctgccgtgttgttgtttcatcatgcatttttggaagctctgattacttaaggagaccaactaagagcaaggtaatttttttttaggtgcatggcatacttgtatacatgtattatagcaagtaccttatctgagagtacctaatttgcgagtaatgggttcttttggagttttatctccctcatgctagtacattaattactatctttggctccttttaaatctctctgtattttttttaacttccatgactattgtatgttttgctgatattttataagttcaacaataggcagggttagactgtacttaaacattaccggtttgaactcccacagattggtccatactctaagaagaatgtatgcttcgtcatgttcctggatgagctaacactgggaactctgtcctctgaaggaactggccctgatgaaactggattcattggcctgtggagaattgttgtagttgaaaaattaccgtacaaagatatgcggagagcaggaaaggtgccaaaatttctggctcacagactcttcccctttgcaatgtaagtttttgtttgtgcaatatgtatcttgcctagtttcatggagaatatgtttggtgttagtgatgtaggatttgtttaggtgcatgaggaatttattaattggctaaagctaaattgtcctatttgcagttgaacatttctataataaaagacatgttataaattctaaatcaacaatagttactgtttacttaccatgtaacaagttgataaaaagcatcctaagttcctaagtcctaactactccctatgctgtttaggatttttgtgaattctttcaactgtttcctacatatcaatctcctatatatccatgatccgtgtttcctctacttggttaacaaaagatttgtacttcattaggtactctatttggttggatagtaaactgcgccttaatgctgatccaatgcttatcgttgagtatttcttatggagaaataaagcagaatatgccatttcagtgcactatgatcgtacttgtgtctcggaggaagtgcttcaaaacaagcgactgaacaagtacaaccacactgctattgatgagcaattttacttttaccaatctgatggtcttgtgaagttcaatgaatctggcagagagcctgttcttccaagttgttcgtatcattaccttatgatctgataaattacccagtatgaatatttcttcagtattgatcttttacatcacaattgtgcagatgtgcctgaaggatctttcattgtacgtgcccatacaccaatgtctaatctgttttcatgcctttggtttaatgaggttaaccggttcacctcacgagatcagttgagttttgcatatacttacctgaagctaaggagaatgaacactggaaaaccttttcacctcaatatgtttaaggtaataaaatttctggtaaagcatttcttttccttgctgaatttctgctgctgtggtttgaattagtttgtaatgacaaaacataggagtccatgcatttacacttttatgtcccaacatgaaactccataaaaatctctttatttttttatgaacaattttaaagaatagtttaatcaccgtttaataagatgtacatcaataagcaggattgtgaacgaagagcgataactaaactgttccatcaccgagctaacgagactgcagatccacctccagctaatccttgatttaagattcacttaccaatatcagggaaatgccttcatttgggtgttacttctgctactcaagccgctgctgctactaccactagtagtgcatcgctctctactagtagggcattgctcaggagttcttcatttgttcagtatgtcctatcccaagctgctggtccttcattgccaggtgaagggagtattcttgatcagggttccctactgctggccagactggtttacccaatctaccacttcagctcacgcagagcatgtcggcttcttctttctcgtttagcttgcaggggcatcgtgggctctcttctttagagtcatatttgtgggggctttatggatttgatagtgcacgtctgggcattgccgacgatgcagcaatttggtggggagctcccaaatcaacagcagcagacagatggctcttaccagcagcctcttcctcgagctctcagaagataatgctctctctttttttttggaggaagttaaggcatagaccatgtgtcgtttgtttttgcttctgtcgatctctggtctgtaattgctaagctgaaacgacttcatagttcttacatatactccattttctagtactagttctaaacctgggcaccatgcatgcctttttccttatgcggagtttaaagcacaatttaaagttgttcaaccgagttgagcacaatttgttccgcccgaaagggattacccctcccctcttccttgttcggtttgaaggggcttgaaggagattagaggggtttgagggggaataatttcacaccacaatgtaaaataaatcccttcctctttaggattaatcgaacatagccttatgcagttatgccgagttgagcgcaatttgttcagcccggacaggagttgattaccccacacgtgctgcggacgtacttttatacgtacatatacagcggttcaaatgaatcaggagactcaaatgatcaaatcagagcagcctacctagcagatgggagtctcagaaacaaagccaagtaagttatcgtagtagtacatatagagttacgggatagaatctatgtgactttagaaagttatagaaatttttttttttggaatacgtaaaaagattgtacacttttatattaagaggaataaaatctatacgggtggccaaacaaagaagaaagggagggatcggggagaaaaagaaggaaaaaagaaagaaaaggaaaaaggaaaccaagaacttgagcatattctcgcgttgataatgtgacgacctagcgatgaaagttatagtagtttatcttttgtaagaggaatatgatggtttgtcaaggctgaataacgaagatgtagatcacttccattttgtcttcaaagaaagaaacacacattgtcttcattttatccagatagaacaacatctacacgctacgcacgaataattcttcttaaataacaacaaagtttaactacacatgcatatacataagcaaacagtagtactgcacgggtcatgggcgcctgcgccttaagctgctgctgcttcaatgcgagaggccgcttctgcttgttgagacgccgctcatctcgctctcgctcgcgtctctgcagccgcttctgcttcttcatccaagcaggcgtgtggcggctgaaaagcctccgcacgccggcctccgcggcctccaactcctcccgccgcggcgtgcactggtaccacgcgaacacgccgtgctgctggcacacccgcctcagcctcgagagcccccagccgatcttgacgaacttgaagtagcgggtcctcctgatgtacgccatgtacccctggtctcgatgcgaccacacgccgaatcggttctggacgatcatgttgctcgcgtgggcgtacgtgtacaagtgccgcttcatcgcgaacgcgcgtctcccttcgggcactcctgagcggcagtagttgccctcgacctcggcttctaattgtgcctgggtcggcggctccatgtctcgattgccgctctcgaaacgatcctgatgcaaacgagattataactagctaggagtaattaattaaccaacgagacaaagttgtattcagatacgtagacaaaggtaacactattacgttgttaactttgattcggtcacgtacaagttgagaaccgcagaacgctcgtatttaaacggggacaaccggacatatatggtggcggatgagtctcattccgcgctctctgcataatttataattaattaatacatattcacaacaatggcacataattagtactaaatggagtctggattgagtgactaacatagagcagttcaagttggcacacaacattttctgcgagacttgctgcaaagtgcaaactccagggggtgagagtgagaccatctgttattgtagcgagccagctgcatgacaggggcaagagaaaacatattcgtataaaaatatactactaccttcgtttcataatataagtcgttctagcattttccacatttctattgatgttaatgaatctagaacatcaatatgaatgtgggaaataatagaatgacttacattgtgaaattatcaatactagattttgggatcgacggcaaagataattgtctgccaatgtgacgattactgtctcatgcaagatcaggaagcagccggccgggaatcatcttcatgttggctgtgaatttgacgatccatctccattatattaagatagcagcaactcgtaacatgacatcagtattagctggaaaactctgaacaccagcttgcctacgggaaacgagaagtagctatgattcagtggacaaagtggaacgaataaaactgaactcaaacgtcatggaaaccgttttacatgaatacaagccatttgctcatcaataatcacataatgaccttctatgcaagatagcgatataacttcctatctgctttgtccctctctaagaattcacgctcaattagagattctatgcgtttctttatgacaacaggattcggcatgaatcgggcttgcaattgcttggtaacctcagctacaatgctgttatgatccaagaccctcctggatttcataatcctgacgatagcagcctcaatttgaggtttcctgtcctcctcaacccgttgacgagtctcttgtttctctggctcagattccttttgcgccactactgtcccaatcttgaccttaacaagcttgcttgtgaacttgtcgttgaagtagaatgtgtcatcctccgatatatctttgctcatgggttccttgcggagaacattcttccccttgacacaagcaagagattgaaggcatctctttagatccgaggcaggtatcgcagtatcttgttcgatgtctttgtaggttaacccatcggtagaattaaacagcatgagaacacacatctgataagtggatacatttagttcatgcttctgacctttcccaaatgtggcttttatgtcagctgttcccatgtttgtttgccatgtcaatctccggccactgtgagttccaaggtagtatgtccggaacttatcacatattgcaaggatttcagttggaaggttgcagggagggcagggctgtgttggccaagaaccagttgtaagaatgtggacatcaagtgttgggccatcgccaagttcctcagacttcttggcataaaagtctatcatagtgtcctgagaggtcttcatgtcagtgaacatgccctctaatttggaagtgaactggtacccacattctgtcttgagtttaactatcatactcctctcagcatcatcagaaacagttttgccagacaatagtcttttcgccaaatgctgcttgtagtacttctcaaatacatccttctcctggaggtaccgaaacagcatcatgactttgtccagaataacctccacatcctcttctgtggctcctttcaatcctttccgaagtttatcatcaacatacaacgatatgaattcaggtgacctgttgtttaagttgatgaagtactcaaaggatgaatttagagcattctggaaagttttgtcattgccaaaagcaacgttgatgatcttatcatgcttgtccttctcatttaacaagcgctgaacaaattccactgggtctttcaacctctcaggatctgtcactaactgcttccctgtttcccttaggtatgaagtcatcacatctctgattgtcgatagcccatcaaaaacccttcggaataagttgtacatcctagccaagtcgtcatatttgtcatctacaagcatatttacaaggcctgagttttccatatgaaccaatctatgcatgtgattggcaatcatttctttctcaaccacactagttatctttgcctcagtgccagaatccaagtagtgtgagacacgttccatttcctcattgagacgtctctcggacttcttaagatagttcccacagtcacagcactcaatgaactcctgagactctccactgtagaagctagctgtaacatccaaaaacggcttctcaaagtcatcttgatatacagcagcaccaagatccattaacattttcgttatgctcctcatcaggcctctgttaatcatttcacccattctctccctgtgaataagatccagaagggtatcaagcagccgactatgaatcatgggagagtgaattatgtgatccctccacaaattcaaaccaagctcatgaacaggtgttctacgggattgcgggacatatgttcgatccatgtacattagaatatctcggatcatctgcaatgccttattgtgatccatccacttggcattcagctcctccagaaacaaaccaccctgtgcagcctctattgattttgatatttccttcaagcgccatgtcatagttctctccaggccatcatatagcttctcaccatacttgtggagcaccatgttgtaggcactcctgcacagatgaaaggaaatattgcaaattacaatcaagtgaggttcagaatagttatttatcaccaagttgctgtgacgaccaaagaggccgacaagcatggcttccaacaactaagtcaatactacagatgactagatggagtaacccatcaatatccaacacctaacatccgcccaatctccctaatactgatcgttgactataaaaattctgtattttaacgaaaatttgtaggatcacaaatactaaaagagaattctctcgaaagaaatcactttcaaccatcaacatatgcgacaggaatgttcggctagtaatcataatcattaatcatctcaagaggagcaaacttattagaattggcacactgaaattttctaattaaccacatgttagggccggggcggtaggatctaggtcgccaagcgggaaacgcgacggcgacggcaggaggcgggaggatcatgggagtgcggggcctcggggggttgtaccaacctgtagagctcctcgaaggagaggccactggcgttgtggttgtagatctcgtggatggcgtgctccaggaccttccatgtccgctccgcgtacttggggtcgagctccacgcggtgcttgaacagctcgatcttgaagttgcgtttcttcggcggcccgcccccgctcatcgccgccgccggtgaggtcccgctccgccggcggctagggttttaggccgaggtggggtgggggaacgtggacagagagggggagggcgcagcggcggacagaagagaaaggcttcagttcctcttcttccctgcagtgctggcgtcgcctgctttttttttttctctctctctaattacgaaggcgtttgcctgcttttcgctcagggagcaaactaataattgtgttgccacaaaccaaatacccctttaacaacactaaccaataaataatagtagatatttcttgatgttttgaataacaaaatatatctttgactttttttactataatatatgtaataaataaataccctaccctctaagagcacctctggaaaactgaacgacatatctaccttaccccctatgagcacatacagaaaattgggaagttgctttaaaaatcatattaatccattttccaggatttttaagctattacttaattttccctaccctctataagctccttcggaaaatagcacctcgttatcaacagttacgtcacatatctaccctaccccctataagcacttccggaagattgggacatatctaccctaccccctatgagcacctctaaaagattgtgctagcacctcgctgtcaacagaggtatgtcgcatatctaccctaccccctataaacacttccggaagattgggttgtcacttcactatcgacaggtacgtcgcctatcactaaaagaataattagccgtaaatgcaagcacctgtgtcaatcttgaatttgaacctgggtgagttggttccaccacaaggaacctaaccagttgagccacgctcatttcactattatttaattaatcatgcggtaatccattacttcattttacgtgtgtgaagggttaatttccaacacattgaagaacacaacctaaatatacaatatatctcggaaatgatatatcatgttcgccacatagaataaaaaatattaagccgttagatcgtgatgaaaccaaaccataatgatatagagcgatggcaatatagttgtataaagatgcaattgtatacacaaatataaacataagtttgtacattaaatctaatcctagattcaaatatcgatctattctatacaaaatataattgcatatatggacatatgcgcaaagagtattatcacaaatccaatatttaactagctattttgtatggggaagtcctctactttattatgtaatatttgtatgatatgaatgtatcctatatatacaagttttcacgtgcacacaccattcacactagttgataaatgtcactaaaagttcttagaaaaaaactatacatatattttcagtaatattatatctatatatatttctttgaatctatatatggggcaatttcattcttacccctactttcatgtttaatattggttttgcctctattttttagggtttttgttttggcccctatttttttaaaacgaaattaagctttacccctatttttgatggacatgttaacggcgttaaatctttgacgaaaagacatcctaccctcactgtgctgattttcccctattttgttcattagttctgtttgcatcttgcaattttcgtaaaccaatttgtttcaaaatttgatatacaaatgtgataaatatagacaaatattgaaaaaaaaggacaaaatttggaaaaaaaaaaggtcatattctacaagtcgccgcctcctggccgggtcgacgggccaccgccgccgcctcctcctctccgcctcctggccgggccagtgggccaccgccgctgtcacccctagccgggccgccgcctcctttccaagctgagtcgccaccgccacctcctccccatgttgagccgccaccgtcgccccctggccgagccatcaccgtcgcctcctccccagccgagttgccaccaccgcatcctcccagcgtcgagccgccgccactggcgggaggggctgcgcctggcccgctcgccgctgctgcttggccgccggccgctcaccgccgcgtcgccctctccccgccgcctggcacgctcgcctcctgctcgcgccgggaggagctgcgcctagccgacgcatgctcttcgccgccgccgccaccacccgctcgccgccgccggctaggtctcagtttgaccatgtgcagcgagaggtgaggagaggagagattagttttaactctttcacaggggtaaaagagtaaataactaattcaaaaaatctttatttcctttatttctcatttttattgccataaacctggtcccactaacttccatccaaaccaggggtaaacgcctctttcggttaaaaaagtggaggtaaaaacgaaaactctaaagagtaggcaaaatcaatattagaggtcaaagtgggggaaaaatgaaattgtcccatatattttcaataatattatatctatatataaaaaatatgacatgtttatactcataaaactatcaaagttttttttttcttgatacgggttgaatttgaggctaacactctacagataagcataatactataatactattgaaagtaccaaattttcgctgatatttgtagttggtatgatatcttccttcgtgtagtgcttgtaattaattaataactataaaactatgtatagaatctacttacatttttcattactttcttatcctgttagttatattcagaaattcggaattaacaaatataaagttataggttgtggattctaattttttttcttcataaaataattctaaaaattggaaaaataagtataaagctgcacttttgccataataacgcgattctagcattgaaactttatttttttaaaaaaaatgcaattctaaaaaaaaattccctctaactacctttcattcatttttgttcatcgtacctaacaaccctcccgcagtcccgctatcaatcaccctcatttatgagggacatatagattatttttaccctgctgatttattatcttttgaatgctataattgtattttctttagggtggaggaagtagcttttaaaacaaaagcctcacattatcacatccaccttatccaaacaccaggaaagggatgtagaatcgtttctctcgacatgattcttgcatatttttctttttgagcttttccggagaatcttgtctcgctgttgcagcttgcagaggtacagcacggcatttcccatgataaggattaggtactaaaagtaccggtaagaaagaaggattaggtaagctcgattattgtgtggctagtagcatgattgcacatgtagaaaggttttttatgtaaaaccgtataaaattccgacttagtgattgctgatttctcacaagtcgatggtccctgcccaatctgctgccttgtccgcacgattactcatcagttcacagcatctctagactctaggcctcctttggagttgtagacataagagaccaagtattatttatatatttattcttaatccaatcaccaaatcagagtggcgcagcggaagcgtggtgggcccataacccacaggtcccaggatcgaaacctggctctgatacttttccttttttttctgtcttgagcgaattttaagggaccggccggctacaagattgggttttcggcccaaaacgtaaggccaaccacagctcgtatggcccaacattcttaccagcgttgaacatcatcgatcgatccactgctttgccaacggttgtaagaagaccctgttactttctgccgctctggtcgatcacattcacacacccacaaggccaaatgagaccataccatactgcaccgaatcgatcggcacaagccttcacgtgacggagccacagtcgccttagccacagagccagcgagcgagctagcgccatagatgcatcggtccatagcttaattaaatttcgcgcgcatgcacaagtcctcgatcgatcagttagctggaccgatatgatgcgatcgaaccatcgatctggggcacacacgcacgcagacagatcgatccatgagacgagacgagacgagacgcgacgcgcgcgcgcggtccgcggtggcgggggcgcgtactgcctcactgttcatccgacgcggatcggtagctagctcgctgcttagctccaaaaggcggcctaccccttttggcctgtaaagagcagcgtacgtaccccgcgcgccaccgcttgctgtttgcatatgtgcatgcagagagctagcaacactagtacgaaactacgaattattgccactgcatgctgcgacatcttctggctaatttaaacagctgcgtgcaaatgtaggagtatatatatagatcgatcactgcatattagcatatactgtatagatcgggatccgggattactatagttagtacgctttctgcctgcgcatgcatgcatggatatatctacaaattaatttgaatacaaccttaatgacgacgtacgtggtacgtacctgccctgcagccgttacggcgatgaagtcgatcgatctgtatattaatttgcactgtcagccagcgctctgacgagatgatactatccagctagagctagctagacatgcatgcagctagctctgccgatcgtatcacccccatctatggcctgtgcagtgcctccatttaactcgcccaacatcgcatgtttgccattgcagcgctaccgctccatgtctgacacacacgactagtactctggagtatctaaaagtgtagtagtagtagtacataactagtgcaaatctgcaataccgcaactcccacgagagatatgccaataattgggatgcataatgataaccacgtcagagatttcgcaagtgcgaacaactgcatacgagtgatcgtgtgcctgcgctattctcagagtctcagtctttaattatcgacctgaccatcttaatgcattaattgagcgtttttaagatcgaccggagcacgtacatatgctagtattatcgcctttccgcgggtgcctttagggcttgttcattattttgtactcccttcccttccttccagtatatagtaatcttagatcgaacgagactcatcctaaagctataaatctaaatattgggcgtgtccaaagagattaccttaaaaaaaactatcacaagttttttttaaaaaaaaaactttcaaatttaactatagtatataatttcactaaaactacactataacaataataataacttgactataacaataataataacttgtatatatgtattaaaataatatatgcaactttatatctaatttatatagagataacaatgtagttatgtaactatagtgtaactatagtttaactacatgcaactaggatgtaacttgaacaaatctgttataaatatgcgatggtgggactggctagtgtcactagcttatgaaaagagagttcaaatccaatagcaaaatatctcagcacaaatcttagcgcgggatcgacggccaaacaaattgaatgttttcagtcctgaaaaacctgtcgacaactagctagcagcctagcagaaacgatgtcgaaatttatagttctagaatgagtctcatctcattctaggtgtctcatctcattctaggttgctatatatattaggatagatgaagtaggtacttcccaacataaccaccacattattagattaccaacttttattagatgtgttcagtttacagttttactaaaatttagaaaaaaatcaagagtgaaaatttctacaatatcaaagttttgttaaatagcattcctaagtacacatttaatttgttacattaccaatatttgacagggttaacgtggtggcaacgaaacaaacaagccctcaatacacgcatacatgcagagatcagccggattcgatatcacgatgatcaatactggccgcgagcgccgccggcccttcgtccatccggcctctgccggcggctaaccattgaagggcaactgcgtagctaccggcgcgcgagcccgcaaaagctaggcgacggatgatagcgatggcgcgcatattttgctggctttactattgcttctcggtaggagtatagtactcgctgtttattctcgcgatgtcctttgcctgcacgcccggccattagcatctgcaattctgcagctgctgtttcctcttcctttactacagttgcacgtacagctagcgctaggtagctagctgttgattttcgatcggaaggtttctttcccattcccatcgtattgcctcctttcccaaaatataaaaaaagtttagaaggttcgacatgaattaagaaagttgaggaaattaaataagaaaatcttgtaattgattgagaagataatgtaggtagctagggaatttaaatagtgaaaaaatataattggttgagaaaataaatgtagatgaaaacattgttatattttagaatgacatggactattttgtattgagattctccaaaaataacggccataaagaaaatgatacacttacgtattgaagttaccatgatttaatcaacaaagaacatgacataggttttcatctaggaataatatcatttgggagggggcggggttgcaagtggacgcgataagtgtggtacgtgattccgagtcatgtagggatgtgcactgaacgctgaaaacgccagcctctatatagcatacgtgattttttttaacgaaaattaaatttgaaaaaaaataagagtctgaataaaacaacgagctcaatttttcttaaaaaatattaaccaaatttcaaaactttaaatcaaaatttaaaacttccacctcaaatctaacactttcaactcagcatttaaaatctctacctaaacttttgaaacttacatctccaaatctaaaactttcaacccctattattttatttttattataaaatatcatgtttcgtctccctagcgtaactgcgtctaataggcaccctcacatgtcttcatagagagtaaattacataatactgttaacaaacctctaaataaatcactagttgtataaattccttgatttccacttacagttcaagtgcctacatctaacaaaaggcctatataaatcatcaacttttacaagttgtcaggttacataaaatgattgggcaatttttttttgttgttgtaaaatgaaagagaaaaatgggtgcagcggtggaggcctagcatgccacaacacgacctctagatccagtcgttgcctcccgaccaattaattccattgtgtcagctgcaccagcgacagagcacccccccaactcaagaatcacatgacctagaggcgtagcatccgtcgaggactcctcgactatagtgaacgacctccacaaaagtcattgccgaagccgtggtctccctaacatccgtctgctcctcctactatttcctagggatgcatgaagtggagcatcgtccatcagccaactctgcaaaggtgaacgcaacacaacaaacacaccgcaaaccacaggacaaagtaagagagagtgcgaaagtgtagaaataaataacaagcgagctatcatcttgttgatgtaaaaacacggcggcctgagagatcttcttaactccagtgtaggtctaaggctagcctcgagtgtcccactaggcgtgctaaaagcgtgttgaaacatgacggcctggaagatttgcttaactccagtgcaggtccaaggctagcctcgagtgtgtcaagggggtgccagctgatttgatcttacaatcagcaagaaagacaaaagcagagttagtcagccgatagccgatcggcagatgggttgatagcatatcgttggtagtcttagctgatgcgcagtctgacccgaagatcaactcgatttcacaccaaatccgcttcgctcttcccccttcttttttgattttgatgttaaaatttgttgctaacacatctgcacacaaaaagcaagttttcttaagagtccgtctgtaaaaacaatacctaattcttatcattatctataaaaatggccaatatcttggaaagtcattttttaagcagtgtaaataagagaaacacaaaaaaaaaaaaagcatatcacgtattgttgaactcgccaggaatggatccaaaagattttacagaacatgtcgttcggtaaaaacaatagtaactctactacgtattccaacaagcacataccaatgtctttcctgatatatatacgttagtttttcttgaaagttcccattaaacagcatattccatagaatttcaaagaaaattgtgggaccatgcatccttcggtccaaaggagtactaaaaattctttcaaatttttctcttaccaaacgagatggttggaaaaattccattaaaaaaaaagagagatggatggaaaaatgacgcgttcctactcccaaactggccagtgggctctcctcttccacatgaacaggtgatgggccatgcatggcacgcacggacgcaccgtaccgcatcctgcaatccacgcacgatccggccgcgggccggcgcatgcaaaacaatcatgcgctctttgactctcccaccccggcaaactggcgagccgccgccaatccgccgccggccgtccagttgcatgcatgcatgcatgcgcactcgcgaccggccagttcaggtggttcaaaactagtaagagaggaagcagatagatcatcgtcatcatctcagccctgaacctgtggtcttattaatactccactactgctccatcatctcatcatctgcttcgcacgcactggcgaatgagctagctagctagcgagcgagcgaacaagcccagcggtgccatgcatgcgacgcgagcaggagcagaggctctgcaagtgactgcaacccgcatgcatgcacgctcacacaagttaattggaccaactggccgggagagctgcgtatgcagctggctcctgaaatctaaaactggtagttggatttggaccaattggggacttgggggccagagaggcgcatgtactcgtgaaatctcttgggccctcgtccgcatgtactactcgcctgtccatacgttttaacgctacgtacgcgatggcagtacagactgagtacgtgcatatgatctatcagcatatgtatgtatcggtcctgtcatgcactacgctgcaggtggcgttgtggatatgttaactgctgctattccatatgcgctgcatgctgctgccaacgtacggctgcagagaggtatatacctatggggcccaccggccggggacccgtgaactagctaaccaaacttactgtaaattttttacccggtcgagccgtagaccgtagtctacacacagctcacagataaaccgtagtctacacacagctcacagagaagagaggcctgcagaggcacagagcaaatggcaaagcaaagatcattgagagggtgtttgggagagaggggctttctaaaaaacataagtccctatatatttttgtgagagagactaaattttagccccactttagtttctccaaccaaacaccacatgagccacaggcagcagaggaagcagaggcctctactactacatctgcatgcatgcctgcgtgcagatgtcaccgtcgacctctgcccgttttgcctccctggtattagcagcagcgcaagcctggctggccggcccctctctcggatcgcaatttgcagcccacaaatccaaaccccagccgtctgatcgatcgatcgatctaagcgcccttttctttctctctcaatcaaagacaaggtgatcaggagtggcctatccgtattgctcctcgtgatctgctttatgtgcgtgtccgtgccgcaggtttgctgttcccctttgtggttagcccgcatgcatgcacggacgacacgatcgagctggtgcatggcacgcacgacatcagtcatcaacgggccagccttggagccagtagggacacacgccacaacaacacaagatagcagtggtataactatatactgctcgcgacactatatttctaattttttttaacggaaagcagcactagagtgccttttcattgaatagagcaggagaaaatacaaacccctaggggtaaaaggaaaactgagagccactatagctgtacactatacagagtgcgggattaactcacgcagccgcttagctcctgctaaagcccaaaggctcgcctcctctttgattttcattagtaggaagttcgttgccacctctttgtgatcaaaaatccgccgattcctctctttccaaatttcccagacgactaacagaatgagcgatcgaagtccttttttcgggacactaggcgtgtttgcaatgttctcccaccactgtttgactgactgggcttcctcccattccgttgggtccatctgctgatagcccacccatgcagagacgaggtgccagatcctcttgatgtatctacaagtggcaacgaggtgcaatgccgtctcagtctcgcggcggcaaagagcgcaacaaccattgttctgccatcccctggtcgcaagccggtctgaagtccagactctgttctgaatgatgagccaagcatgaaatttgcatttccctggcgcccaggctttctgtaacgctccgcctttcgcgagtcgttaaaaactaattcggcaaaatcctaattgcgaaaattttcgttctttgtgtgcgagtctaagtcgtgccgagatctcatatcaaatcccgttgttccctctcatcgaaatcaaaatcctccgcctcaaatttcctcttccaattcaagtctccgaaatctaaatccgaaagtcaatcccttcctttgaatcctcgccaaatacatttctaaatcccaaaatgtccaaacccccgttttgtttccttccttgactccaccctatgttcccgagaacaaatacccaagtattccttttgaatctttcccatgacttctccttgaattccccttgatacatccctaaaccctcgagttcgaatatcaaatttgaattcgaatccaaaccctaaatctctccaattctatccaaatcagctttctcagtaaaagtctactttacctccctcgtgatgatttgggccgaaacctgccgctggcccatctcttctcagctctctccatctccacgtgcgccgcacgtgaccaccgagagagagagagagagcgctgtctctctctcccttccctctctcgggcgttctctcgctctctcgttctctttctctctctcgcgccgacgccgcttcccgccgtcgccgcccaaaacccgccaccgccttcactctctcccgcgctcgcgcgtggccgaccggccggtcgttgccgccgtcagccctgccgcgcctgcgccgcgcagccgcccggttgccgccgcgttaagccctggcgtcgcctgcgtcgtgcgctgccgctccgccactccacgccgcacccatccaagagtaggagaagcagctgctctccctctcctccccctgtctcacacccctctccctcctccttttcccgtttcggcaagggtcaagccctcctttccctcttcctttttccttttgcccgaccaccatcggtgtcaccgcctgccaccgcctgggccacgggcgcgaccgccagctcgccgcccccaccttgaccgcgccagcctgcgctccagcggttcgatttcagccgcccgatccatcgccttcgccgctccttgcatcctcggcatccgccgctcttgcatcgcctgtgaccgccagccgagcgctcgaccgctctatgtcggttccccctcccaaaccgacattcctccactataaaaccaagccaccccaaacccctcctctctcgttttcactcgcctcagtcctcacacccaccgcgccattgccgccgaaccaccgtcgccgccttgttgctgcttgtcccgctctcgccgttgccgtccgttgccgagcaccggaggagccggtgcgtgcgtggacgcgtgacgaggagctccgggcaccacctctccctcccttcttccccggccgcgccctctcggtgccgtgccgcctcggcgtcgcgaccacctcgccgcgacaccgaccgcgccgccaacgctgcctcctcttcgttggtgagctccctaccatgatcctcctcctgccgcacgatgcgccgcgcccgccgcccctcggcatagcttgccacaagctcttgctctgtcccggaggccgcctctcatcgccagccaatctcggtgccgctccgtccaatccgacgccggaaacggattccttgaaccccggagatgctcccacccctttgaatcgaaccctcatcgtctcgtcgtgttttccccttttgatctccggtgattgccgccgccgcaatccaccgtcgtcggctcctctcgcgtcgattcctctcgccgccatgctcccggggatccccttgacctccccctggctgccccaaggccgtcggccttctcccttgtctccgcgccgtgtcaccgcttccgccgccgcctaacgccgccgtgcgtgagccgccggtgaccatcgggtcccgcgtccccgcgtgcgcatcgcggtcgcgtaccggttcggctaagcccgagcccgcgcgcccttcgctcttctcgcgcgcggccacgtcggcgtgccggcgagattggtcgccgccgccagccgctgtcgtttttcccccggctaatccgctccgttgaatcgatcccccttggcctcctctctcttctggtgctaaccccccaatccacctcgccgccgttcgccggttcacgtcgctcatcgccggccatcggatcagcgtgcccggcctcctctcccttccccatccgacgtggcatccacgtggatgccacctcagccgcccggccccgcggagaccggtcaaaggtctcccggtccactgatccaacgcgccgccttgcgtgcaccccgctcgcgtgagccgtgtcgccgccttgtgggtcccaccttgcgcccggcacggtggaccgcgtccaccggcttgcgtcgcgtgggccgcgcctcgttcggccttgggccgcctccctcccgtgcgccggcccgctcgcctcggccgcgcccgcgcatctcttcgggccgcgccccttcgttcggcccaagtccaattaacatccctccatcctttctttttttcagggatttaataaatccttttttcctttgtcccataaatcaattccttattccaaaatttccatgaatcatttcccttggtcccgcacgtccgtgactgtcaataatattcttgagaatattatttctataaattccataaaccatttctcctattctagaaactccaattaaacttccaaaattcatatctcccgatccgtaattccgattgaccccgttccacttccagtattcccgtaaaatcgagatctatttaatggcactattatttagtctaaataggatccttttcttggtcttttgtttaggttttcgattgtttgtgtatagttgcggttaccggattttcgtcgatcgcgggttttctcgaagattcgtgaagcttcgtgaagaccttgagcaaggcaagtcaccctttgaccaattgcccctataattgcaaagtcattattattttgtttgcaacatgcattagtagaatcacacacttaacttgcttggcctcggtttgcgtgccaaaccgacggacctacccagtagtcgcactaattttcgtaggtcgtaataccctgattccttgtcgctccacccttgtggtacctcggtattcgtgctctttgagcgcgtataccaaatatcccacaaacaccattgtttgtcgaaaacttgggaaatgggtttgtgaagccttcaaaacccgacatgtggtgtcggtgtgtttgaaaataaaatgaattgtgaaaactcgcgatgcgggggttgtgcctatgtggcactgtcccgtattcgcatataaggaccgattcctgtgggaaactcatcgaacataatcaaagtgcaaccacaaggtggaatgggacaccctggctaagtaactagtcggttcagggaaacctcgcatgccaatagttgggaacgccggggcggggtcggacaaaccgggttcctggtaaggcaaggacgagaagcttgctcacttaccgatcaaggtggttggagtttgatttgtgaacgcctaaaatggcctatgtttatgtgaggatttgatccttctatgtggcatgaggtaaccctgggtcggcttgggaaaagctttgttgcgaacctccgataccgacgggtgttcggaataagttcgtatcttgtgggtaaagtgtacccctctgcagaggttaactaactgttcgaacagccgtgcccacggtcatgggcggatatgaggtggttcccgttgcgtagatttgtttgcctgtgctttgtgaaaagttgttgtggtgtgggaatcgtaaccagaatcagcctatgtggcagatggatgacctgagtggtcagaaacgaatctgtgtgattcgggatgtctgtgggcatcatagactaggcttcccgagtggaggcggattgctttgctgctgggcagctggactctgggagtccgagaaaatgaaaaaggctctgggagccgattaatcaagtggaatggctctgggagccgagaagtaatgatctgacccgggaggtcggtacattactaaatgagctgttgaaaaacatctcttaaagtcgaatcgagacgcaagtctcttttcggcccaaacttagaaagaaataaatcacttagtgatttcaaaatgatttcaaacaaaagatttgcaaaacaaccttgcctctctttcaagcttgcattaaacacctaagttcccgtgacttgctgagtacgaaagtactcacccttgctctatataaatatttatatatagttcctccgccctgaagagaagataaagtgaagtgaagattagggtttcgtcctggttcccagccgtcgcctgtggtgttgggtgttggtccgttggttccgctgctgctgctgctgttggtgttttctcgtccgcgtcgtcggttgtattctcgggttgttctgagctgcaacctaagttaaggtaaataagtcctctatttattttaaggattgctatgattcatatttgtcaccgtgagtaccagcactatgtcctgggactggtaccgagatcgcggtttcgtaggaagcggttcgcaccgtttccctacgacacgctcctgtcaggtgccgttgtacggcggtatcagattggggtgtgacactttccaaatcaaggaattgaagattgtactcggcgccccgcagcactgcgcatggtaagccaaggaggccgtgtaatgcccattgtttgtgaacttccaattaatctgatcctgttctccaacgtctaagtgcacatttcggaccgcttcccacagtgcgactagctgttcgacgaggtcgactgtgatagatgattgtgaatcaagcttcaaatcttgcactcaggcgtcctcctcctttccttgccgaagggattttcctctgttttttgagatcgcatagacaagcggcatgaggtctttgggtcttcgcccaccaatccacgcggactcccaaaatcgcaccgtgtttctgtcccctattgttatgtttgttgaggcggcgaagaggttcctatctatttcatcacatggcgtctccagccccacccaaggtttggtctggtccttccattcatgccacagccatctcaacctcaaggccctcgtgaatttgtccagatttaggacccccaatcctccttggctggttggcatgcacgtctttgtccaattgaccttgcatttccctctggtaatatcacccgtgcctgcccagaggaagtggcgtcgctgcttgtctagctgctcgagggattcctttgtgattttcagagcggtcagaaggtagattggttgcgccgttagcacagatttgacgagcgtagttcttccagccgctgccatgttttttcctctccagcttgctacccttccggaaattttgttaaagacaggttgcaagtccaccttccgcagtcttcccagagctagggggaggcccaagtacttgatggggaaacttgccctcaccacagggacgccgtcaagaacctcattcaactcgatgccgccgcatctgatggccgccacttgggatttctgaaaattggtgacgagcccagttgcagtgccgaagtgctgcaggatgtccgtgaaggccgtaacatcgcctcgggtgggattaatgaagatgatggcgtcgtctgcgtacattgagatccttagcctagttgttctcccccgaattttcgagattgcgccgagctctgtagccttgaaaaggattcgctgaagggggtcaatcgcaagtatgaaaaggagtggcgatagggggttcccctgcctaaggcctcttccgtgcttgatccgctgccctggcaagccgttgagaagtacttgggaggtggaagttgatagcagagcccccaaccaatctatccactttgttgggaaaccccttcgctgcagcaaggctagcaggtaatcccagcgaactgaatcaaaggccttagttatgtctaacttgaatagcagcatcgcccgcctcaatcgatggtatcttctagtcatgtttctcacgaagaggaagttgtcatgtatgcttctcccttttatgaaggcactttggttgatcgaaatcaagctgtgcatatgaggccttagtcgcaatgcaagcatcttggagaagatcttagcgatactatggattaggctgattggcctgaagtctgaaacgccctcggccccctctttttttggaattaggacgatgttcgcagagttgatcagattcaggtgtgcacatctgagattgtaaatggagttgaagaccagaaagacgtcctcctttatgatttcccagcagactttaaagaaaatcccggtgaagccgtctggccctggagctttgtcacttggcattttcttgattgcttgatgtacttcctgttcagagaagggctcccctagggtggctaggtcaatcggtgagatgtcaagggcatcccaatttagcttatttggtcttggcgccggccgtcccattatgctcgcaaaatggtcatggatcgttgcttccttctccttatgtgtcacagcgcaaccattgtcttttttcagccgatgaatggtgttctttcttcttcgcgcattcattttgagatgaaaaaactttgtgttcgcatctccctcacagatatgtgttactctggaggcctgctttttccttgcccgctcaatggaagcgaggccaaggatcttacgcttgagggctgctcttagtcttgtttcctgggcagagaggtctctatgttcttgtgccacatctagtcttttaatgacgtcgagcgccatgtgaaactgcagtttggcctcggtgtagattccttttgcccattctctaagacaggtcgcggtgcgatgaagcttttcatttaggcggtgcataggctctgtgtgtgacgaaggctgacaccaggcatccttgaccttgtctttgaatcctggaattcttgtccagaagttctcaaacttgaaggctctcggcctacgtggacattgggggtcggagaggactagagggcagtggtcagaaggccctgtgggtagggcgtgaaggacatggttagggaaggccaagtcccaagtctcgttgcaaaagtagcgatctaacttgacaagtgtagcccttcgtcgttcgttgctccaggtgaacttcctattttgcaagggaatctcatgcagttcacatcgatcgattgttgagcgaaagcgtctcatgcgtgcaaggttgatgttgctgttgtttttgtcccttgctcgatagatcatgttaaaatctccaaggataagccatccgtcctcggggccgggccttattcttcttatgtgccgaaggaaggcgcttttgaggtggtgccttgtgggcccataaactccggtgagcagaaatgtggcccctgtgagtatgaccgtcacttgcgcagaaatcgagaagcgactgactcggacctcttggacgtcaaagactgcgctattccataagaggaggatcccccctctcgtgcctcttgccggcttaaaggcaaatttgtcgagtttgtagcctcctaaaaagcgggcgagaccatcgtctatattctgtagctttgtctcttggaagcatgccaagctgcacttcgtgtctgccataagctcatggatcgtgttacagcgcgcagccgaattgagctccctcacgttctaggaaataatatctaggatttgcatcattttagtaaaattgttctccgtattcgtggcccacgaagggggtgggctgcttggtcttgtgtaggggcggcggcccaaacagtcagcaggcgctggccatggccatcccagccgctgggcctgcgcaggagggcacatagaggcccgggaaatgctaaggagggggcggcctgaggcccatcggccggttcagggagaaacaagcggaggggggtggcttgacgatcggagagaggcccattaggcggcccacatcgtgtctggcctggttcgctggagaggcccaggaagcggctggactggttcgacaggttcacagtggcccgaaggtgttcgacgtaatgtgcggccgaaaatttggcggtgaagtccgccgaagctagcgccgatgcaggtaaagacgatgcgtagacaagatgttcacagaagacgccacactgcaggggaaataaacgaggttcttgacaacataaatgaagaggttcttgcgaggccgccggcgatccagcttgacacagaggggattgacacggagaggatagctcgcaggccaccagcactccatccacccaacaaaagacgacgatacatggagaaaggaaggctcccattccaggtccggtcaataccaggacacattaggcggcgttcttctctacctcatcggccacttccgcaactccttcacctaccagagatatcagtgccgcgtccatggcgtcctgctcgtcgtcgtcgatgccaaatatcgcagtgagggcggcgatgatgtggggtggcagcagcccattgaacatggcgatgtattgggcaaggacctgctcgatcgatgtgccgccttcgtcgttgaggatcccgagcctcttgaagagaactcgctggcaccgctccatcgtcggccttgaagtctgcttggcaatgcgtttgttgcgccgggtggcctgaccgcatttccttggctggatcttgagccgccgtgttagctggatcggatgcacgcacggtgatcttggcggcgacgctggtggcgaggcgaggattgctcgcggcggtgatgcaaacaggcatcgaggatgcccgttgagttcggcgatgccgggaccgccacctgagaagactggatgggggacggagtaggtgggagcggcgccagatggctgccattgccatccttgttgcccccttccgccaccacctccctcagatcgtgcatgaggctgacttggctttcgagaggaagcagagtcggcgaagcatgaggtggcggtgaggcggcctgcaaaggcgacacgtcccccactgggcagtctatcgctgccgtcgccgccagctcgagccgcaacagcgcttcttcaacttgttggcatgtggtcgccgcagtcggcggtggcaggttcgacttgatgcgcgcgaagacgctctccaccgggatcggcttccaggctgcatgctgaaccaggcttcattccttgggtccgccgggagagcgtgctccgggagtggcggcatccccgccagagccttgttcgcgatgaaggagagccgttgtagctggtccactgacgatggcaattggggctcctgcagcgagaagggggaattgtgcagggcgtgcaataagtggaactcacctacctctgcttggagcgcactgccgtgcagagcaaaggcgtccgtcgaggagagctgcttgctcgagtcgtagatagtgtcagccggtctccgtctaccgccgccgtagcggctagagcccccctgtcccgccgccgcagggagcgcgtgcgctcgcggcggtagtcattgtcgcttgcccgctgctcgccacagtcgtggccaagatcgcagtctcggttgtcgcgatcatcgtcccgatcaatgcggcgccagggtcgcgggtggtcgttgctggacccccgtcgcctgcctcgcccgccccggtcacggtccttgcgatcgtcgcctcgaccgcggtcatcgtcccggtcacgttcctcacgatcttcgtcctggtcgtcatcaaagtcatcacggtcgtcgtcgtcgcgagggcgcccgccccgcgccgcgcgcccacggcgagtgtggccgtccctggtgccgcggccggaccggcggtcgtcgtggtgatcgcggcgatcgtcctcgtggcgatcgacttcccgctcagtgccgccgagacggtcgtgaaccgagcggggcggcggtgggtgatgcggaaaatcctcgaacacccgtcctgggacctgctcgccgtcgagcactcccaggctccaaggcggcagccgacgcttggtcggctggaagctaccttgctcctccaggtcaattgttgccgctgtgtagtcgtggatttcttccagatggaagaggaccggatggcgcacccctctctgccagtgctccggcgggctttccaccgcgagcaggggtgccagcttgggatctttcgccctgttggtgaagctgagccacatcctcttcgggatggtgctggggttcgccgtccacgcccagaggtcgatggagcgcgtgttgccggactccaccggatggacaacgtcggtctcgatctgctccagtgcgcaggtgcggccgatgatccgctcggcgatgtcggcagcccaggcgtgcatggggacgccgtcgaggcacagccgaacgcggaacataagcgcgacgccgagcgcactctgcaggctgcgccacttgatgaaatgaatctcgatgccgcgacgcttgacgtaccctttgaccagggcctcctcacaatggcgacgatgttggaacttgatgaggaaggcctgtggatggtagagcgagacagccacctcgccccgacgaagctggaactcatctaggaaggcctgctcgacgtcgcgcggtgtagtggtcgacggcgcgtgggccgcccaggagacagccgcagtctcgctccactcgcgcagctcctcgtcaatggcgtaagaggtggggatgaagcacgtgtcctcctcggggcgcgtggccgggtcaccgagctgcgacatcttgctctgggtcgaccggggcggtggcggcggcagccgggtgcgttcttgcttgggaaactgtcacagcctgattttcgttttaggatttagaaattatctaataaattattaatagaatttatattaaatgttcattaatttacaagtgaagttaaatgtgggaaataaaatttcctaaatataaagcttggatggatttaatttttattaaattctccatgattaactatactctctgaaattttctcggatttttcggagctcaattcctaaatgatacaaagaacagttcagtaattatttgatcattaatgatctaattataattgttaagagcttttcttgtttaaaaatccttaaattataaattgttgtttaaaaggaattattagaaatgatcttaaaagcctaaaagagaagatctaattttaatttgctaaatctcaatataaaatttggctagataaaattttgttaaatacttctcttgaatctttagttcctagatttttctgggatttatttgagccaagaaagtatttttaataaatggaattccatttcatgaataatttaaatagaaaaatgtttttaaacccctcttttggctttgggccgaaagtcggcccaaaaccttcctctctctctccccggcccagtcggcccagtcagccagcagccgtctgcgcgcgcgctcccttccgctgacaggtggagcccacctgtcggacccgtcgtcaacctcgcgccgtcgcccggccgaaccctagccgagccgcgccaccgtctccttccaaatccggccgccccattccttctccagccaaatcatttgaggggaaataatctcctcgatctcctcttccttctcttttagaaacttcggctaatttcgtttggaaaccgacggatttgagctcgattcggatcgacttttctccctccaacccttgctttccatctcgccgccgatcgccgtgggcctccgtcaccgctcgctagcccctttataagcatccccgggacctcctctttccgccgccaccttcgccctagcttgtcgccttctctagcgccgcctccgcgttgctctctgcgtcgccgccgccggcgggtgtctagtcggtcgccgtcgtcgcttcggtcatcgccgtcgatcgctgtctccttcatcagcatcgtgaggtcgtcgctgtttccgtccaccgcttcgccgccgccgaagaccgtcggagcgccgctgactccgtcgccccgaagctctccaccgccgccgtcggtccagccgtgccgtgccgctgttgcagccgttgtcttcggtcaccgtcgccaccatcgggatcgcgaggaggagcagcatcttgtccacctctctgttgccgacgtttcccaccgaagcaccgccgtcaccgccgacccgaaggccgtcgccgcctcagcctcgccgccgtcgtcatccgtcgtcgtccgccaccgtccaagccactggtgagttcgccgagtcgagctctacccgttggtaccctccgtttgcgccgtctcgccgccgttcgccgtcgagcacgtgctcccgagtcgccgccggtgatgacgtcaccgctgacgtcatcgtcgccatgtcccgtgaaccgcggtagatcaagttgatcttggccgttcgttttggatagggtagatctcggccgtccgttccgtagaccgccgctgtgcacccggtccaccgtgagccgagcccgctgacgcaataatcctcttttccttttcaaaaataattctttattgcgtcataattcaattaaaatccatataaatgttttaatccggtttaatctttaaaaattcataactaattcatcttagctcgggtttagttggttcaagtctctaaagttgtataaaataaagatctacatattaaaattatccataaatagaattaaatttatttaattctttttaaataggctttaattagattaaatcttgtaaaattcgtaataaattcatatgaagtcagaatgaggccgttcaagtctcataatacatctaaaattatgatctacatgtttttttactttatatttattgtttatttggagtttcttagtgttttccttgttttgcgtgttagcttgtcgtttccgtcgtttcgaaggtttgtgagagcgccggaagtgttcaagaagattaattgaagaccgattattgcaaggcaagtcacacagatcctaaacacaatcctttgagcatgttgatcctatatttaaattctctatttatttcaactgtgcatttattttcgaatgtcactgggtggtgtgaatctattcctttgttatggcctgtttgcattgattactctattccttgataccttgggatattataatttgactagttgagctttatatatattggttcaactagatgttagatataattgctttgcaatgcttagaaacattagctcactaatgggatgaatcatatatactacattattatttatggttatatttaatggtagctcacgatggctaatcgtgttatgataattaattggtaattaaaatatgattaatggtgggttgtgagcacatggttttgaaggtcgtgctcatggcaattaaggaccggttcgcgagctactgttgtgaaacattaaccgtgccaaccacaagccagcgtgggcaacggctttaccttttgtatagcatggttcattgcggagcaccagactgagaagtggcggagataagcccacgggggtcgctggggagtccatgccttgttttataagggggtgattatgatccaggaatggtgcactgtggtgagttgtgttgtgcagagtgtattgtcacagcctctattcgggtactttccagtatcacgacgcatggtagacatgatgttgaggctgtgtcttgtgggtacagtggtacacctctggccagagtaaaactattcgaatagccgtgcctgctgtttttcttttcttttgtaagtatgtaacgttattattatgatggatttgtatattaaattgtcagtttgtgtacctcggctgattcctggatgaggattttatgcacaaattagttcggaaattattagtgaatttccgggcgtgacaggagcgctggctgagctgtgggggaggcgcgcttgcagggtgagaggactggcgaacgctcgcgtcgagcggaggtgtgaggtaagccggagcggcgacgaagcagaggcggcgggcgcgtgtcggcaaggtggtggcgaagcagcggtggtggcggcgtgcgagtgcgagccccgtagtatgagtggagcgtacgggacacgtcgcgaagacgagccgacgagcgcgcacgacccgccgagccgcggcgacgacagtcgcgcacgcggtgaccggagcgctgacagaggaagcagcagattgggtcctgcactgggctgctcggtgtccacgagagaggcaaatgaaacaccttccactggtctgagccaagaactctcgatgtgaggcggagaggtagtctcggcttggccgtacagcgtcccgtcaacttgaagacggccgaagcgcattgcttgattgaggtgagcgttgtggtaggcagacgccgcttgaatgcgcctcgcgtctccgcgagctcctccgctgcacccggatccagccaggatcttgcagtccatgcccatcatcctgctcggcgatgcgacgttgaggtaggctagcatcgtagggggcggctctccgtggtgaagtgacccggcgagtggagcggtggttgttccggacgggagaagtaaatggcgagtttaagccggagctagctgaggaacgcgcccaaacaacctgttttgaatttgaaaaatgtgatgccgctcctctgacaacttctgcgaacgagcgacgcaggccggtgtgcgacggatctagcgtctccaggaccaccgagatggatcttgcgctggtgcggccacccccggccagcagccgcggcggcggcgacggaagcagggacgtcggaggcgatggcggggccggtgctgggaacggcgacggggcactgggggtgcgacgcgccgtgggcgagggccacgatgctgcggagacgggggcaggccggcggagaaggatgcgcgtgggcggcgttggctggagcgccgacgccgtcggcgggggcggtggcatgcttaccttactctgaatgacattttttttactatatttctaattaaaaccgttttatatttgggaggcacactgcgcgcgacccagtgttgtccatgctatatgattgttctccgtgccaacgtttaaatgcaggtaggttcatgtttcaggccaatgtctcactggtggagaaaccatctttcgtcggtcggccgatttccacaatagtcccggatgcaataaaaaccggggctaaagataatctttagtcccggttcaaaagggtaacgggcatatttgatctttagtcccggtttgtgttaccaaccgggactaaagatcatctttagtcccggttcgaatgctgtcagggcctgtcaggcccccccgggatctttagtcccggttggtaacaccaaccgggactaaagatcgtaactttagtcccggttggtaataccaaccgggactaaagatcccggtgatctttagccccggttggtgctaccaaccgggactaaagtcccacccctatatatatgtcttcttcctcctccagctgcccgagcaagcttcaaaatttcttcaaaaaagaggggaggtcatgccaaaatttctattgaatttattttggtgattacatacaaatcggaggtgcctaaaaggtttgcaacttcatcctccaatgttttttttgtcatactacatttgcacctatgttttgcacactttttttgtctccaaaatttagttgtaagttgatgagagagaaaatgtgtgtggggaagaaagaatatatagaaatttagttcatttgctaaacaaggttttataaaatagttgagaaggaaaactctagtgaaagttaatcttaaataatagaaaacaaactaaaatgaaaattaaaagaagtaaaacacattaaaattagtttaaaactttacaaatagtttttaagaattatttggtgtaatagttttgactcatgtagatggatcggcaatggatgtacgctgaccggcggtccaaagagtttattgacggcgtgcactattttttgagagtggccgaagctaacaggcaaaggggttttatttgttgtccatgcaataagtgtaagaatcagaaggagtattctgcatccaggactattcatttccacttgtttgagtcggggttcatgccaagctataattgttggacatcccacggagagcaaggtgttgaaatggaagaagatgaagtggaagacgacaatattccggactttgctcagtatgttggatttgaaggaaatcaaacgggcgaggaggaaatagctgctgatggtaacgacgttgcggatgatcttggtcagatgttgcaggacgccagggaggactgcgaaagtgaaaaggaggcccataaattggacaagatgttggaggaccacagaacttcactgtacccaggttgcgagcaggggcacaaaaagttggataccactctggagttgttgcaatggaaggcaaaaaatggggttagtgacaaggcatttggcgatttattgaaactcgtcaagaacattcttccggggggaaacaaattgcccgagacaacgtacgaggctaagaagatagtttgcccgttaggactggaagttcataagattcacgcatgtccgaacgattgtatcctatatcgcggtgaggagtatgagaacctagaagcatgccctgtttgcaaagcactacgatacaagattagacgggacgatccaggagaagttgacgggcagctaacaaagaagagaattcctgctaaggtgatgtggtatttccctataataccacggctaaggcgtttgttcaggaacaaggggaatgctagaatgttgcgatggcacgctgaagagcgtcaacaggacgggatgctgagacaccccgccgatggttcgcaatggcgaaacatcgacagaaaatttaaagaatttggaaaggacgcacgaaacatacggtttggtttgagtacggatggcatgaatccttttggagagatgagcagcggccatagcacttggctcgttacgatgtgtatctacaacctccccccctggctatgcatgaagaggaagtacataatgatgccgattattattcaaggccccaagcaacctggtaacgacatcgacgtgtacctaagaccactggtagaagatcttaaacagttgtggaagaaggaaggtgtccccgtgtgggacgaggacaaacaggaggagtttaacctacgagcgctgctgttcgtaaccaacaacgattggcctgcacttagcaacctatccggacagtccaacaaggggtacaaggcttgcactcactgtatggatgaaacagaaagtacgtatcttaagcacagtaggaaggttgtatacatgggtcatcgtcgattccttgcagcaaaccacccggtacggaagaatggcaagcacttcgaacataaggccgaccaccgtacgaagcctaaacatcgcaacgggaaaacagtgtttgctatggttaaagatctaaaagtagtgttcggaaaggggcctggaagccagcatatagagagcgaagatggtcacgcggcgatgtggaaaaagaactctatattttgggagttaccatattgggaattcttggacgtacgccacgcaatcgacgtgatgcacctcactaagaacctttgcgtaaaccttcttggcttcctaggtgtatacggaaagtcgaaagatacactggaagcacgtaatgatctgaagcatatggaacaacgcggcgaccttcacccggaaccaaaggagaaaggaagccattacttgagtccagccagctacactcttagcaaggcagagaaggaaagtatgtttgaatgcttggagagcataaaggtaccgtctggatactccacgaatatcaagcgaataataagcacgaaggagaagaagttcacaaacctaaagtctcatgactgtcacgtgttgatgacacaactgctaccagttgtaataaggggtatccttccagacaatgtccgggcaacaataacaaagctatgtgcattcatgaacgcaatttcgcagaaggtcatcgatccggatagattagaagcccttcagaatgaagtggtgcaatgtctcgtcagttttgagttgatatttccaccttcatttttcaatataatgacgcatctactttgtcaccttgtgaaagagatccgtattctcgggcctatgtacctacacaacatgtttcctttcgagaggtacatgggcgttctgaagaagtatgttcgtaaccgtgctcgtccagaggcaagcatcgccaagggttatggaacagaggaggtcatcgaattttgcatagaatttatcgaagaccttcgcccaatcggggtacctgaatcacgccatgaagggagactacggggaaagggaactctcggaaggaaagcaataatgacggtagacaacaatttattccgtaaagcccatttcacttttctgcaacactcttcattggtagctccttacatcgaggagcacttggctctagttcgcgccaggaacatcggtaagtccgatgcatggattacacggcatcacattgatactttccccgcgtggctacgacaacatctcatgggtaacgagtcgatcaaccaacaacttgccttcctggcgagggaaccgtctgggtcgatcacgacattccagggatatgagatcaatgggtacacattctacacgagagcccaagacatgaagagcacgaaccaaaacagcgctgttcgtgtcgatgccatgggacacgatggaacaactgccacgtattacggtgccatcgaggacatatgggaacttgactatggtcctctcaaggttcctctgttccggtgccaatgggttaggttgactggtggaggcgtaatgattgatgacagtgggatgacaactgttgaccttaacaaggttggatactcggacgaaccttttgtccttgccaatgatgtaacgcaagtctttttcgtgaaggacatgtctagcaaaggaaagaagggcagagggcctgatgagcctaagcgtcaagtggttctcccaggcaaaagaaaaatcgtcggagttgaggacaagactgacgaggattacgatcagttggatgggcaaccccctttcacggtgacgattgaccctagcatcctcctatcaaatgaagacaccccttactcacgcagcgatcacaaggagggaacaatagtgaggagaaagtacgtgcggtcaaccgtcaccgccgatgtaatgtcgtaattattgtgtacacgatgtaaactattttggatgtattgattatccatataaatcaattgatgtatggcatatgttaattacgcacgattattagaggtttcaacaagtttaaatcatgtatatgctagttatatgtgatacttacaatttttaaaagttttaaatcacacaggtggcaatttcatatgtatgttaattagagtttttaacatttaatttactagcattcatatgctaattataattgactagaggatttttaaaagttttaaatcacgcaagtggcaatttcatatgttaattagagtttttaacatttaatttactatcattcatatgcaaattataattgactggagaatttttaaaagtattaaatttaatatatttttaaaactatcattcatatattagagtttttcacaatttaatttactgtctttcatatgctacttatatatgactattcgaatttttaaaaggtttaaatcatgcatgtggcatttacatatgttaattagagtttttagcatttaatttaatataattcctacgctaagtatatatgatgattacaatttttattaattttaaatcatgcagtatgtacatacatatcttaattagagtttttaccaatataataatatcattcatatatatgctaagtatatatatattggaatttttattaattataagtcatatatttgcttattacaatttatccacttaatttattacagacaaaaataatttttcgaagtaattgtcattaatctttgtactttaaataatgttaatgcattaacttctattttataaacacatatgtaagcgaaaatcatatgcagtgctataatctttagtcccggttcttaaccctaaccgggtttaaaaagaatttcgaaatagcgggaaaagatatttactcccggttggtaataccaaccgggactaaagatcatctttagtcccggttgttctcaacaaccgggagtaaatatcttttctttactcccggttgttctcaacaaccgggactaaagatttagtcccagttgttctcaacaaccgggagtaaagatcttttctttactcccggttgttctcaacaaccgggactaaagatatctttagtcccggttgttctcaacaaccgggaataaagatccgggggtatatatattcccggtgcgccctcgtcttcttcaccaacacttagacgttttcagccgatcgatctttctcggcctctctccttcgccgccactgcctagggcaaatccccgcaccgacgccgccgtatctcgccgtcgtctcgagctcgtcgtcctcgtcgccgcctccgcctcctccgctgccgccgcatctctggggtgagagccgccgccgccagatctcccttcatgcatctcgatctctccgatatcgatctctctccgtcgcgccgcccgccacgagacgccgcgccacgacgacgacgcgccacgacgacgacgcgccacgccgccgccttcgccgccgccgcatgccaacgccacgccgccgccgccgtcgccacgccgccgccgccgtcgccacgccgccgccgccttcgccgccgcgcgcgcaatgccgccgccgccacgccacgccgccgccgccttcgccgccgcgcgcgcaatgccgccgccgccacgccaccgcgccaaccgccgccccgatgccgccacaccgccgttaacgaacgagaacgagaacgatcgaacgaacgagagcgagaacgaacacgtcaacgtacgttgccgcgagaacgtgaacgagaacgagaacgatcgaacgaacgagagcgagaacgagaacgatcgatcgaagacaagcgagaacgagggaacgaacgtgaatgagaacaagcgaacgaacgtgaatgagaacgagcgaatgaacgtgaacgagctagggaacgtgaacgagcgaacgaacgaggacgaacgttaacgtgaaatgcaatatatatatatatatatatatatatatatatatatatatatatatatatatatatatgttacttcgcatttatcctaatacatctttttgtatcttgcagaaaagacgtgttgtcggagtcgtccgtcaagcctgagtggaagagctagccctagaaggaattggagcaggcaagtgacgtaataatataaatgattgttatatttgtaatgcaattaattaagattattagacctgtaattggacttatcatataagattgtgtagtgttctaatattatttgagttttaatataagattactttatttgtaattagacttagtatgtaattattgactacggaattggtgcgacaagtagcaattgactattgtagtcttaattagacttagcatatacgcacgaaacacttagcatagatgactattttagtcttagcaagtaatattatttgagttttaatataagattactttatttgtaattagacttagtatgtaattattgactacggaattggtgcgacaagtagcaattgactattgtagacttaattagacttagcatatacgcacgaaacacttagcatagatgactattttagtcttagcatgtaatattatttgagttttaatataagattactttatttgtaattagacttagtatgtaattattgactacggaattggtgcgacaagtagcaattgactattgtagtcttaattagacttagcatatacgcacgaaacacttagcatagatgactattttagtcttagcatgtaatattatttgagttttaatataagattactttatttgtaattagacttagtatgtaattattgactacggaattggtgcgacaagtagcaattgactattgtagtcttaattagacttagcatatacgcacgaaacacttagcatatacatgactattgtagtcttagcatgtaatattatttgagttttaatataagattattttatttgtaattagacttagtatataattatttactagctagggttgtataatatacgtcacctagacttagcttatatgacgatttgtaattagacttagcacgtaaggttgtgtagggttctaatgtacgacatttacacttagcatacatgacttagattgttaaaacataaatgtctcgtgacttagcagatgtttcttgtatcaacagatggctgaccgcgatgaggaacagatattgtacgatacaatcgcggagggaagcagccagtactggaatgaagaagaggggaacgaggatccaaaccagtacttgaacgaggaaggaaacgtggagagggatgcggaggggaaccagcaggggcacgtggaaagggatgtggaggggaaccaggaggaggaggctagtggtagtcaaccctccgttggacagaagagggcacgcgggcaacgaggtgcagcgaagaagcttgagggtcggcacatcataacggaagtgcaagaagatggacgtcctagtgccccggccgaagccgccaagaactatgtacgtcacagcggttgggttgtgcgggataacgtgcctgtcagtacggtgtactggcgaagaacaagggcacgcggagatcatgagagctttgtcccagattcggagaaagagatgctgtggaccacaatgctcgagacattcacccttcctgcgggtacagaggacaaagtgaaaaggtggactctgaagaaaatggcagaacagtttcagagcttcaagggagatctgtaccagaagtatatactgaaggggcagacaccgaacttcgacacattcccaaagctaagggatcactgggacgagttcgttgcatataagacaggtgaacaagggcaggcgatgatggaaagaaacaaagaaaatgccgccaagaagaagtaccatcaccacttggggtcaggaggctatagcgtcgcgatgccgaagtgggaggagatggaggctagcttgattgagaggggtatcgaaccggcaacagccaattggccggaacgatcgaagttctggtactatgctcacggtggaacgctcaacccagctgatggctcactggtcttcggcgatcagatacgagaggctgcgcgacgactaacagatgcagtggaagcctcctctcagggcacgttccgaccagacagagatagggacgagctgacactcgcccttcagactccagagcatccaggacgaacacgagggaaaggggtgattccttggaagattggtttcaaggaggacatccacacgtacaggagtcggatgaggagcaagagagataccgaggcgaagattgcagacctagagttccgggtatcgagctacgaactcaacatgcaagaggaggtggcaaggaaggttgatgaacgcatggccgcacatcggtcccatgatccccagccgaccattcctcctgcaatggtgagcccgtcaggaaaccgtagcagctgcgcctcaacggggcaggtaggatcacagagcatggacgccatgcaaacacaggacgaatcgacctgtcccgttgatgacatcactcagcggacaccatgtgagttgcatattcctttcaagaacttatcaataaaggtaagatttagccattccgctagttgctgcttatatatgttgattactaataaataatctctcacaacatgaaggtggcgtcgggcatggccatcccaacggacccttcaggtacttaccactgcaggccgattccagcaggatactcgaaggtcgaagttgagttggtcgaaggcgcgtacgaggacctcgagctggattaccctggaggagacggtgagacgcatctacgagacacaagccatgccattattctatggcgcaggcggtacatcatcctccctgggcgacaagcggcgtctcgtgcaccatctcctccggctccgccatctcctcctcaggatcctgcaccgtctcctcctcatgctccgccagcaccgtctccacctcaggctctagcatcgactcctcctcaggatccagcatcgactcctcctcaggatcctgcaccgactcctcctcgtgctcctacacctactcccccgcaagctcctcttccggcaccttcaaagtcaagggcccccccagctccaccacctgcccacacaagggcaacgaagaaggcgaaagttgacgccgccaagaacaaggacccggggtacgattgcacccaagaggagcttgacgcttacgttgcatcagaagtcaagagacaattcaagcctcgaagtccagaagagaagattcctatagaccccagtgtcaggaacttcttcaggggtatgtctgcatctgtcaaggaggccatcaagctatcggactatgagcgaacgctgaagaaagcatcttctggaaagtccaaaccagtccctcagcttggagagcaaccaaaccaggagatcgagccgttggtgaccggtaaagaaatgacgatagaacaatttattactgacaccggtctaactacggatcaattgctaggagtcgcaccaatcgaaaaggcggaagtgaaatacatgtacgaactcggtaaaccgcttgtcaagcctgagctgctgcagtccctacccacacaaatgtacaagttccatcagctgtacatggagatgagcgccaccggtagagagatgatcggagcgaggatcagggacacggacttcttgcaaggagatgacattctctggatcaatttcaggggaatctacgaactataccagctggacgccctcgacgtctctattatgagttgctggattttgtaagtatatcgttcagttagatttcttactatacgtctcctttaattaattaggtccttgtatataagtagactatagaaaataatatactcccttttatcgttgtagaatggagattcaaagggcccgacggcggagggttttcgatactggattcatcgaccctcggaaagtaaacatcgcaatgctcgaccaatatccacaagaaacagaggacaatctcgtccatctcctgaaggcgcagcattacaagacgttcatactgttgccatacaacacagagttagtttaattttactgtcttcctacataccaaatttcattcccgtacgaacttgctaagtgtttcatatgtaatgcatcccacgcacattgcagattccactgggtgcttttactcttcgacctggaggcctgcaccgtcaacgtatatgacttaatggataaaaaagagtctacgtttgacaaggttttcgaacttatagctaggtactgtcataagttcctttgttaattaagaaaatcttgttatgttaattgctactacgaatcatagctttaaactccatgtagggcttggtatcggttccgtcatttggtccgcggcaaatggagagaaagacttaggcggaagttcaaatttcctgtgagtacacatgctctacatttatatttctccgattcaaatacatacaagtgtatattaattagattctcgttgtttgtcatttatttgtagtgcgcaaagcaaaagcagggaactaacttgtgcggctattacgtgtgcgagtattgccactgccttgcaaaccaaatcatcaccacaagagagctcgatgtacgtacaaataaattcaaaatttcattacgtagcaatttcttgtttaattactaatcaatttcatacattcatatagtttattcgcatgagggataacctgaccacacacaaggaatttatcacggcggttcaagaacaactcatgggattcatcaacgaagaaatccttgatcccaagggtgaattctactacgacggaaacacaattcactggtccttagcttctgagctagcagcgagtactactacgtcgaaatcgtagctagctaggacatataatggattgtaattaatacatgactacatatgtttctatatgcatgtgtacacattttctataatgtaaatatattttggtcatatatatatctatatacatatgcatttgcataacatatatatgtataaatacatatatattatgcatgtatatacatataatatatatatatatatatatatatatatatatatatatatatatatatatatatatatataaaccatgcagcaacagggccatgaaaaaaaaaaaggtcagctcgatctttagtcccggttggtaacaccaaccgggactaaatatggctcagccggccacgtggctgagccatctttagtcccggttggtgtgaccaaccgggactaaagatcgatctttactcccggttatttcacccgggactaaagatagcgatctttagtcccggattggtactcccggtttagaaaccgggactaaaggggggttacgaaccgggactacaaaaggtttctccaccagtgtctacacatcacgcgcaggccgggccggtctcacctatccgtgcgtgccatcttacataatgtacagccgcactggcatcttgagctcatgcccccaccgtacgttggtcgcgtcagggactgctgcatgcatgcattatgtaaaaccggtaactgaaatcgttatccaagcatctttttcacccgccttttttgaatatcgttgtcccgtttctctctcatctttgtgggctaaggtggcatgtcggactcaatgccaactgtggcacaatacctgtagtgctaatgatcatgattttatatatatctttgcgattggatatgatgagtgaattatacgaaacaatatgatttgatgtgtgaaacttctcaaggttcatagagcatcacagaaggaaaccgtattgcattactacctagcaaatcatgcaaaactattgtaacggttggtttgtgcctttgtgcatctaagatccagctagcggccggtttatctcattatcaacaaaagcaacacacacaacctcacaagaaagagagaaagagagagaagagataagaagagcaacacaaattaaacaagcatgtatatatcatgttacatggtgggggatagaaaaaatctcccttttaagaagcaccagagatgtgatggaggattagtcttggtacataatattatactcacatattggtaacgttgtcaaaaaaaatttagtgaggttagagcatcaccaacaatccccttattccattcccaatcctaatattttaggattttaatgaaaaaaaatgcctccaacagatctcctatccaaatcctaatttattagaaaccccttccctgcatccttcactctcttcatttgagggagagagacgacgcttcttccgttcccaatctcttgtttgcgccaaacttttcttggggggagtgcaacacgcgtggagggagcgccacaagtgcacgcgagagagaggaaaacggaaaaatccggtgttagtttaacataagggcccacttttagttttttttggataaaatttaggttttctcttggagtgatctgttttctagctgcctattttcagtttagaaaacccaaaaataaatttttggggagagattatacgtgatctgttggtgatgctcttagatatttattgttgatctcgttctttttttaagtgtgtcagtgtacttaaatatgatgagataccctacaactacccgaatttgtttgtacacatgacaagtttccttttgtactgttgtgatgtctctagataaggaatacaactcatgttaattagggaatgaagccctcttagtactgaaggacaccatgtcaaatatagtcaaaactatattcaagctaggatttgtcaataatatacggtgttgctataattatgtcgacacattttgtgagtaatcacagtcgatttcttgttcaatttatctcccgtgagattcgtgcttcgattgcaatagcatgtgcattgaacgtctttacgtgtttcgtattgcatcgtgaagccaaacaattcaaatttctcatctcgtcagcatgtgttttcatgaaagaattacatatgtaatttcaggacttacatatgtaattttaaaacttacattataaatatactaaaactacatatataatttagagacttacatatgtaattttagaacttacattgtaaatatactaaaattacatatataatttaggatttgcaatgtaaatacatgctgactattttttagtgaaaaatatagcgccataaatatagttactcccataatatatctatgagtcccgaaagaatatggggaatctatgaggatgaatatcaaagccccttgaggaagagaccggccgatggccaagcaatccacaacccaacactatcaatgcataaatatgagaaatcacgacaaagactcaccacaaacaccttgctcatggatctcatcgaggtacgtagttaaacagatctagcttagaccaactgtcagtccacatattatagtactccatatacacccagatcaacacatgtaaatagggcatatatagctagtctattacactaactgagatctaaatttgtataaaatctttttcttgtaccacagggctcatcgatctcgaccaccacacaagcaattctaggtatatccattttgggatgctttcattccattatctaaaaaaaagatatatccatttttttaagagaaattattatcgactatctaatctatgatagataatgtgtgtgttagaggtcccctcatgtatttgtgtcttcgtaaaaaaataatctcttttaacttttgatacttcttaagattttctaaaggtgttcaacttatatattttcgtgaaatgatttttgtccatgccaacctcgttatgatatatgtcagtactacccatatatctcccctaccaacatctggtaagctaagtacaaattaaagtagattcttaattaggggaaaaataaaaaagcaaaatactgtaataatattagaggacaggcttgaaactccaagaaagttctgatgacctgatccatgaaaatgccattctcatggaccccattccaaagccaacttcaagtttgttttctccttgccgaagagctcgcttgatcaccccatccaggatttccaaagcagctgccacacgagatcatatatatatccgcaagatatccagggcagacacatggggcctctgaattgataagcacacagacaccaacacatggcgttgttcagctaaagtaagcatctctcttggtcagaaaaggttttactcgcatatatactttgctattcttccccacattattcgatgtcactacggtatgcgatttcgatgtgcaatacatgcatgtacagttgcctactatcggaggatattgaaagctcacgctcagcgctgatgcatttgagactgcagttccccatcctgtcatgtattcgcatcacaatacggctgaggatatccttttaaatttctttcccaagtggatatgttgatgctgtactgcactaggtacatgcatgcaaataaagcctgtcaaagcaaaggtcaaactaaaatggcgtgaagttatggaccaatagctccccatatcgtcaagtgcagcaaaataatataaataatcaaagctaagatttccttccgagatacttctattgacagactacaaataattgaatttgaaaacatgtacaacaagacactgctgttcatctagtctccgattaaatgaaaccaggtacagctttgctagcttgcctgtcctccatacagctggagagatgtgttctgagataccccgcatgcgtttgatctgcatgcagtaaaaatgaaacagggcgtcacgtgcacttgtttggttgccattggcacggagcaaggtcctctaataccagaaaactgaaatcatcgtggtgctttaactccaaaattccacatgtcaaaagtacacgccgcagcatattacagcgaactacgtactgtacgtatgtcaacgaacatggcatctgccggtcgtgtttatgaacacagtttacgtattcaaaacggtactactgtgcacagtacagatctatatagggagtaggtcggttgttatgatcggtgctgcaggggtaagtaaaatcggatttaagaatgctctgtttctttggaagaaagaacgcgcgcagcaaagcgtacatcggtgcaccggaaacaacataaaactgccagaaagagggtcgggccacactgcacaataaaaactgccaaccaatcaaccggggtggtgctggctggtgcctgtgtccatatgctgcggcgtacgtacaggggcatgccaatgatgccatgcatggcatggtcatggacaagagtggcagagacggccgcgtcccggtcagttcagagcctactacttagcttagccccctcgagccgggggtggtccgtccgtccgtccgtccggccgggcgcggaggggccaaaaactatacgcgtttcgctttgcctgtgtacgtaacgaggcgtgcgggcgcgtggggatcatgtatcgatcggggcgcgcgccaaccaccaacgctaccttcccccccgcactcgcgggaggggggggggggggggggggggggcaccaccgcggccgggcgagcggggcgggggagatcaacaaatcgcccgccgcgcgcgccacgcgcgcatgcatgccgctgggccgccacctgctcagctagcagcagagacgagcatctcacgcgagtccgcgaccgagtcgcgcgcgcggcgcggagcagcacgtacgcccggccgccgggccacccccgcggccctcccggctccccgtcccgtcttgttcgccgatttcgcggctgcgcgcgcgcgctcctgctcggcacgtcgtccgtttcggccggtagctagctagaagcagggtgccaaaccgcttgactgtaccgcttgacttctcactgtaccgatcccatctacacctgttgtacgtgtgaatgtgtggattcccaggtacagataattgtacattgattccgatggggataagggaactgctcgatcggtcgataggtgtttccgtggaggtgatcagtgcatcgacacaggcaggggcttgcagtgtatagattccggaaattgctcgaggacaatgacttgatgacctgagatgagtttggccacggtcgatggataggacagtactgatcgaatttatgagcggctggccgacgctatagcaagctaattgcacgcttccatgtatgtgagggtcagctttgccagggagatatatagcctggcaggtgtaccatcatgtgtgcggaaataggaccgcagccaaaacctccgactccggagtctggaccatctgaaaaaggagaaagagtggtgtgggcttttcggtgagaaaaaaggaatcaatcgatctcatcgagaaggaccatcgagccgacggttgtccatgcaacgaaagagcaaactctgtcgctaccaaaggtacctgtatgtagaacgtagacctcgatatacaagtacaaattgttgccagtattggtggacacagttctaaagtaacagggaagaaatgctcaataaaaataactagaatcaacacttgatgtatattatattgcaatcgtataagaaatagcatacaaccaataaattaagaaaaataacatataagatataaaatatagtacaaattcaaagtcgtttagacctaaacgtctattggctagggtactgggcagatgggcaccacagggtagatcgacaaagacgtgtttgcatggctatgggcccacacataacacgatggtgacacatagactaacactggtggccaatataggcactaacatggcaaataggacgagcgtcaagtgacaagcaatgaagatgaacaatcaaaggctagaggagaagggacacgtagggcctgttcagattgtagccaaaataaatcttatcaaatttaggcaatgtcatttcttatgtattcattaaagtttggcaacaaactgaacgtagacacatttctatcaactacgctaaaaaaatggtatggttgaaaatagcataaatctgaacagccccgtagtcacgtaattggaaaataaaacaagaattgactgtctgatgcctaatctacaatacttcatgatctgatagactcgggtctttctctaggcatgtgggatgagcgaccacacatctatgttagtgtcttctaatatgtttaggatgtcttcattccgtttttacaaattctctatttccgttccaatgttttggaaaaagtgtgatttttttttggctagggctatatatcagccatgctactacattagcagtaatgtacactactacaaaaacgattttcctgaacgaaccccttgttagattccagatggtccataactgaccgcgtctagaaaaatcgtcctcccatttttgctgtggatccttaagatgcccgcacacgaaaatcgaacatgcaaaaataagcatatttttacatgcgaacccttaagaggcccgcacgcgaaaatctcctccctcctcaggcatttttctccccggcggcggcgcccctcgcccgcccggatctggaggcggtgcccatctcccacccggatctggcggtgggcggcggccgcattgtggcgccctttccgtcgtggcgcctagcgggaaaattatctcttaaaaaccctaattgcgaaatttgtttccttgcttgttgtctagtgtccgtgccatctcagatctcaaatccccgatctatcgtcgagttcaatcccgaacccaaatccttccaaatcaaatccctccgcaaaagtctattttgcctcccccggggtcgatgggctgaatttctctcggcccatctccccctccctcccggcgctcgctctctttctctctcgctctctctccctcctctccctccgctccgctccgcccgcgcgctgcgtgcgcgagcgcgggagccgcgccgagcgcaccctccccctccgctctgcccgcgcgcgtgcgcgtgagccgcccgcgccgagccgagccctcctctccgctccctcgttgccgctccccgcgcgtcgttcgcgcgcgcgcctgcgtggttgccgcccgtgccgcgccgtccgcgccgtccgcgtcacccggtcccgctgccctgccgcctgcagccgcgcagccgctcggccccgcagccagcgcgcgtgcccgagccgcgccgctcaatccgccgcgcctcccgttgcatcccgcgcgcgcgtgccgtggtggccgaccgcctggtcgccgccgccgtcaccctctgccgcgccagcccgcgcctgtcgcccgtgtcgtcgcgccgctccaaaccgccccgccgtcatcgccgtcgtcatcgcccggcccccgccactccgcgcgcaagctgccaagggacggaggcagagccccctccaccctctgccgcgacgcccccgctcccctcctccttttcccaaagaagcaaggggcgagccccctttctctccctccttttcccctttttctcccgccggcgtcatccttcctccgccctgtcgccgatttggacgcgagcgccgagcgccagctcgcgccttgaccgcccaaagtcggtttccaaaccgacattgccgcccttaaagccccgggcgccctccctctcttctcctcctatcgcctccactccattgttgccgccgccttccgagctctgtctcgcctccgccgttcgccgccaagcgccgggagagccggtgcgttcatggacgcggaagaggactccgggcgctcgtcttccccctcttccccggcccgaggccggagagattactcccgcgccgtcggcctctcgtcacagcgcccctcctcatctcggtagtgcctccctccgttcttcctcctcgttccatctcctccccttagactcgagtagtagcacgagtagcctccccgtagctagccgccgccgccccgaccgttaccgtcgctcgccgtgtgctcgccgccgtcgccgcccgagctcggaagcgcctctcgtcgccggcctccctcgatgcgtttcctcctaatccggcgtaagggacggattcccgtagccgcgtggatgctctcgctgccaggaatcggcccctcgtgacctcgtcgccgtttcccccttctcccgccatcggttgccgccgccgcaattcgccgccgacaagctccctccggcgaatccgagccgttggctcgtctcccctcgtcctgtgcagccgtccggtgtgcttgctttcgctggtatcgccgtggttcgctccgccgctcgccgctgtcgtccgccgtccgttccggccggcgtcgtcgtctacctcccgccagcccgcgtggcagccacgtaggcgccacgtcggcgccagctcggccgagatcgggtcgggccgaccccggtcagcccctcccgtgcgcgcgttccaccgcaagccgtgaggctgcgcatgggcccgccgcatccgttccaccgcgaaccgcgcgcgtgcaccgcgtccctcccccgcccgcgcgcgtgcgccgcgtgctcgctctgcacggtgaaccgagtcaccgacaagcgggtcccacccgggaccacgcgtggtgagcccggtccaccggctctctctctcctccctcccgcgcgcgcgcgcgttgggccgtcttgggccgccttggaccggccggcccatttagctcggccggaccgctccatttctcttgggccgcgccctagccgcccaagaaaagtctatattccctccctcttttctttcttttcttttgttttccaaaaaggatttaattaaatccttttcctttagaccaaaaatccaataatcttagaaattcaatatcttcccaaccgtaaatccgtttgactccgttcaacttccaaaattcctcaaatctcgagatctatctaatggcatgcttagaggtcattaatagggctttattttcgccgtttgttgagttgtcccgtttcgcgtgtagtttcggagcccgaagacccgcagtgcgaggatttcgaggatcaagctcaagatctcgagcaaggcaagccacctttgaacatcttgagcctatatttgaacttaattatgttgcttgaaaaatattatgcattgataggatcgcacttaatctgttgtcccgtctgcaaggcagattggcagacctacctaatttgttgcatttgatccttcctttgttaattgttatatcatgtccccttgtaaccatctagttgcatctcgatattcgtgcaccctgtgcgagtatcaacggacgccttcaaacctaaaatctgaaaaacttcttgggtaaaacttgggttttacaaaatacttggaaaacccgacacctgggtcggtgcttgcgaactaaatgaatttccaaaaccgcggaccggggaacgtactgggtgtacggtttcccgctcttgcacctaaggaccgtttccttggaatttcatctaaacataagacaagtacgaccacatgggtggaatgggatacccctggctgagtaactagcttatcaggggagccttgatgccgagagacatgtggattcgccggggtggtgtcggggaggacccctgggcttcctggcacagtatggtctgggacctaacctgttgttggtctgggacccctctcgtcggcatatggtaaacctgtgtcggcgttggaaatgccttgtcatgaaagcttggaggtctcccgacgtggctgatccccacgggctgggtgatccgggttagtaatgtcgtgtgggtaaagtgtaccccctctgcagaggttaacaaactgttcgaacagccgtgcccacggtcatgggcggatgtgaggtgattcctagcgtagttttgtttgactactgcttgtgaaattgctgttgtggaaaggggttcgatgtttgaaaaatctgcagctgatgggatcagctaggcccgggtggcagtttgaaagttgttggcccgggtgcccgtttgaaaagctgttggtcgggtgccaaccttgaatcaattctaaagactgatacattgcacatactccgaccggacgagacgcactgtctcatccgtgtcgtttgagaagcactcacttagtcgtttttagaaaagagttcaaataaaatcaattgcaaaaacaatagcctttctttgaagcctgcattaaacacttatttcccatagcttgctgagtactcccgtactcacccttgctctatataaataatcccccccagttgctaaagaagatgaagcggatcctgctgatgaggagttcttccaggagcaagccggctacgatgaattttagggtttcggcctagttcccaagtcgcgcctgtgttgtttggtccaagtcctggcttccgtttcccttttgtaatgcagttgtgagctcgggatctgtccgcagcccaacatgactgtacctctactctataataaagagacctctgttgctgtgaaaatccgtcttcctgtgataccagcactgcttcctgggactggtatcgatgaacaggttaatttggagcgtcacgggctagttccgttcggtactagttcggggcgtgacaggcatcaacgccgatgacggtgacaatgatggtgacgacgatgacggctagggttagggttttgatttttttttggttctttttgttgcgtacgggcgacataagccacccgcatgaaaaaaaaatcatatttttgcaaacaccccgttgcagacaggcacgagatccgcacgcgaaaatccttttcgagcgcacacaaaaatcattttcgtagtagtggtagtagatgtgtgcatccacggatgatgggtggggactattgtgggtggctcagtactaaagtgggttctagggatgtgatgaaatatggaccgtagatcttatcaaatggatagattcacctctcattgcgagtgcaatgtattacgcatgaaacacatgatacaagaaggaaattaagtacttctatgtagtggttgcagtgacctgagtatcacctaagatcatgagttcaaatctccatataagagaattttatattgggttatttgagagataagttccctatttgataggctacactggtggagaaacgttttttactcccggttggtaacccccttttagtcccgggtttccaaccgggagtagcaatccgggactaaagatcaatctttagacccggttgttgtgcttttagtcccgggtttccaaccgggagtagcaattcgggactaaagatccatctttagacccggttgataacaacaaccgggactaaaaaaaccggttgttgttaccaaccgggactaaagagagggtagcgggcaatccagatgatccccttttcttttttttcttttttattttctcccgaatcgaatgtcattcacatcctcaaattaaaccccaaatccccaagtcaaagtaacatcccaacttcacatcacaaatcttaaagttactcatacacacaaataaatacatcacaaatcctaaaaaaatacaaaacaaatcaaatacatcacagattatacatttcagatccatacaaatatccaatgaattacaaaactatacatctcaataatcacaaattaaaaaaagaaaaaaaaagaagtcggatgcctccgctcactaccgccaggcacggccccgccggccaccagccgcttgcccgccgccgccaccgcgcgcggccccctggccacaggccgccgccggccgcctgcccgccgccggatgggaggggaggagggcagtagaggccactggtggagaaaccatctttggtcggtccaccagatttcataatagtcccggttgtattaaaaaccgggactaaaaacatctttagtcccggtttaaaagctctgaggaattttttgttctttagtcccggttggtaacaccaaccaggaaaaaagatcgatataagctttactcccggttgatgttaccaaccgagactaaagatctatttttagtcccggttggtaacaccaaccgagaaaaaagtcgacataagcggggtggttgcacgcggatcggatcaatacaatctcctcctctccttttttaactcatctcctcacatagtcacccttatctcttcctctccctcctcccttcctctccgtcctccctcctccccacctcccacctccccacctccctctgcaatggcggggcgcggagggccgggcgaggcggcgcgctggcagctggcggccggggacgtggcgggcggcgcagccggcgcggcgcacggagggccgggcgaggcggcgtggcggtgtgctggcgcgctggcggctggcggcggagctggggacgcagcggccggcgaggtggcgggccgttcgtcttctttttttttctttctttttttttgttgagaatctgtgattcggatctgagacgatttgtgtgtgatgtatttgatttgtgtgtgatgtgaatatgtgatgtatttgtgatgaattttgtagaagttgtgatataattttttaaagattttgtgatgtatttagagatattgatttgagaatttagagactattcggggatgattgatttgggattttgagatgggatagagtgaatcaatatattaaaaacaatgaagaaaagaatagaataaagtagcaaccggatctagcctctttagtcccagttggtgttaccaaccgggactaaaaatggatttttactcccggttttttcacccgggactaaagatagcgatcccggattcgtagtcccggttggaaaaccgggactagagggggttacgaaccgggagtaaaaactccttctccaccagtgaggggaggaggaggaaggggagaagggggaggaggagaggggaggagggagtaaagatagatttttagtcccggtttgtagtaccaatcgggactaaagatctaaatgatctttactcccggttgttactaccaaccgggactaaaaatctatctttagtcccggttgatactaccaaccgggactaaagatcctcggtcccctgacatggctatgacagggcataaaccgggactaaaaatcatctttagtcccagttggtaactaaagatcaaaatttttataactagatctgggactattgtggaaatcagccgaccgagcaaagatcatttctccagtagtgctaagtttctaatttaaaaaggttgcatatatccggttggatgtagagaccggtaaagaatatccttctctaaaaaaagtacttctatgctctcacactctgattagagcttaattttttgagttctgattagagcttaattaactgatctcaaagcacttctccgtgttgtcctgggagacgtgtatctctcattgtgcatgcatgagtatatggcaaataacatccacagctccacctagccagttggtattaattaatttaacaatgtctttttctgtgtggcttaagtgaaaatattcgatgagatatgatatgataaatattatatatagttcctatacgattatgattttttttgttagctatactattatgattgatgaataccaataatcaacttagttttgaggccaactttaatcaaacaaggctctggtataatatcgatcaatcattcctaatcattatcttaatatatgcaactataatatataacacaaaattattgctagtcacttttatgtattgatatgaaagctcacctgtacaattttaacaaattaattaatctgcttgtcgaaaaagataatcatgcatgctttgaatctacttagccattatatgggtctagccaggagctaactaaaacacactccaaagaaaatcagttggacggaccaaacaccacggtacatgcatgatactgatgtttgatgctttgctgccggttgctatcgaccatactactatagtagtgccgtaaagtccaacaagtgcatgccggtattccgggatccatcagtgtaattaagaggccgaacggatgtagtaatacccagaaagaagaagagaggaaatggatggaaaaaaaagtactaagtgctcttcaattatcatggccgattgaattacctctaaaattgaataaatatattttacaccatcaactactcaaactaaacaaatagccaccaactctatctagaggttgtcctatgtgacaaacatgtgacagtccataaaataattttttttataaaaagaatcggtgggacctacatattatattctctccccgctatttatctcatttccctctcctctctatatatctctatccctattcctatctttatcaggggcttacctcgagtccgaatgtggcagacgagatgccgcaaggttgctagaggcggcaaccagcgaaacttttgatatccttggagagggctggaggcgacatccgacattcagcgagctcggtgattgcactagagatgacgtccagtggtagagcttaatgccacttgggaagggcgctgtggtggagctcgagctcacctcaggaaggctggaggcacagcttgtgtggaggtggttatagtggtgatggagttgaagcttgtgcgaaggtaacgacgacctctgccacttcttgccctcctcccgaccctcgctgcgtactgccctcctccctgaaccaaggtgagggtgaagagagagagagagggagtgggaattgataaagaagagaaaagagaaaagatatgtgagtgattttgatgggtggatcccactatttttttttaaaatgctgattgagctatcactattgaatttggtctatttgtctaatttaaatagttgagtgtgcaaaatatcttgtagttaacttaggaggggtttgatttggtcgatcaagattattagggtaattttgacttttgtgataaaaaaataactataggaatgatgtttttttataagaactataggagagatgtagcactcgtctaccacgcgggaagaggatggtactactgactactccatgagctgtggttactggttagccttagctaatttagcttagctaggcggcgggtaggtggttaccgtccgtaatacgcgggccgggcccgctggcaggatgtaaagggacccggtgggcccaccttgaggggtgacgtcagtgcaaaagcgagtgatgaccattggcctggcctagggatccaggcaggaagattccaactgtctggatgacgtggctcgccccatccaatcccaatcaagctgcgttatacacggtcctatccccctctagctacctggagcggcttcagaagccggcagtcagcatgcatgccactacatactcgagttcccctcacctcagattatcggttaatgccgtccactagtattaattacctactgctagcggcttgattattcactgatctatacaaggggtcagcgtctaggcaaggcagctgccgttttttaaagacccgtagtaaagatataatagtacttccactgtcaagagtaattgaggttgagggatgtaacaactttcatgtgatggagagtaaatgggggaattatatggaacacagtggatatgggagagaaaattatacattaggagtatatttatatatatatataagcatatatcattgtcggttcatatcgattcggtcaattttttctttatagacttgatgaaccagcgggggatgccgccgccgccggatccgggcgtgaggagcgtggcgccgttcctgaccgcctcctcatgagcgtgggaaggaatggtcgagcggcagcggtgcctccccgcgagcatggggaggagggggaggagtggtcgagaggcggcaccgcctcgccgtgcagggatggtcgagcggcagccgtgcctcccgcgccgcctccactgccgccccgtgacaggcatgacagagagagagaggagaggcgtgcgagagagaggagaggagaggcaggtatgtgagagagagaggggaggagaggcgagaaagagaagagtgagaggcgaggcagagaaccgaggcaccagataaattaaagagagagaggggaccgaggaaaaagggaaaattttgaaatgggtaggaaggaaaagagggacgagtatttttgagtgtggctctcttaataggtccgcacgggaaaatcggctaattttcctatgcggtcctcttaaattgaccgcacgagaaaatgagccgattttcccgtgcggaccgagttaccgcatgcacgcaatctaaaaggctccctgtcctgaaaaatcgtttatgtagtagtgaaagaacaaagttttaatcttcttcattatttaatatatatttggtcctgttttgcaaaataaaaatttagatatttttttaggaaatgctttatatgataaacctatcatatattgttggaacgaaattcaacatgtacggcgaggcctcccttcttcattagagggaaccaagcttaaagacatgggaaataagataaataagatgagaggatgagaataaacataacaatagtgtggatggaatgggagagaaagccctcttcatttgtccattggaggctcattttattcatgtacaacaggaagttacattattgccttaggttcgctatatgcaagtgatattttcttggtgcgttttagttctatattacattacttaatataacattctaagaatggggttgttctccaacatatatgacaacgccgatggttttccttactgtttgggaggggtttgtcctgttaaactgagaaaaaccgaaacttacgaaaaaaaattttgtttatatttctttaaacctagttggcttaatggatctttatcgttactgtgccctgaagataattaagtacagttatcatggtaaccacatgcatgtaatcggcggttgaaaaccgattccatattaagagagttccatgaaaaaaaaacatttactattatacttcctccgagttgataatactttgagcaagtttaatagtattgatatctactggcttcaaattatctatagtcaatctaatagtcaattcatacaatagttaactacaaatatatactacatcattaataattggtcccacatgtcatgcacacacagtgttttagagttcgtgccgcagctggctataaatctgtagcccgcttctcttctctctcatctcttatctcttccacataagcttgtagccgacttatagtctattattgtatctgctcttatcgttttggacaagagcacggtctacaaaaaagcaactttcaccattatttttcattataatatgtataaaagtgttaacaaatatatgattttattaaagtactttttaagactatatctatacatgtagtcatcatatttgaaagacaaatatttaaaaatgattcataattaaagattctaaagtttgactacatctttatctaaaacgacaagtattattaacccgaagggagtaactaatattataatagcaagcaagcaagtacagaatgaatggatcgggttggtcacgggtagagcaaaaccatgcccaaccccatgcccgtcgtcgcctgcccaaaccctacccactagggttagtgggtaaaactctatgcccgtacccatgcccgacgggcacgggtatacccagcgggtacccaatggatctcacatgaataataactcgaaagatatataatttaacaaagagaaataaaatcaacaatttaccaaattatcagttaacaataataatttgaattacatcgcaacttattattagttagtatcacgaatgaaccaagagaaaggggtataataattaagagataaatcgaaattagctaatacatatgtatcgggtcgggcatgggttacccacaggtaaaaaatgaagcccggctgttgcccacgatgtctacgggtctcgggcggacaagcccacgggtaaaatttcacacccatgcccgtgcccattgggtcgggtatccgcggatacccgaacccatgggcaaaactgccatccctagttgcttcagagctcctacgtgctttggcagtttggcatgctgacacttctatattacaacatactccttgtgcacctttcattgtctttctccttgtttatatagattgtttctaaacattaaactgctagcacagtatacaattctagtgcacctttcattcaaataaataaataaataaaatctagtgcacctctggttgggttgaagcttttcatgatatctactctgcatgctcataaacaatctatctatctattatattataaaaacagctttgaaaggaggcaccacattcgctgtgggggctagaaattcccacattaaacggagaaaaaaaagaaaaagaaaaggagagtccaagtagaagtacaatataaaaatagctgaaattcggaattaaaaataagcaatattgaaagaagtctccatataagaacccaatacgagattaatcaaaattcaaaataaaaataaaataaaatccaaaattagaaaaggaaaggagagtccaagtagaaatacaatttaaaaatagctgaaattatgtcacatcctgatttttgtttcaggatttataaattatttaataaattataaatagaatttatattaaatgatctttaattttcaagtgaagttaaatgtgggaaataaaatttcctaaatctaaagcatggatggatttaatttttattaaattctccatgattaagtcaactctctgaaattttctcggatttttcggagctcaattcctaaatgatacaaagaacagttcagtaattatttgatcattaatgatctaattatatttgttaagattttttcttgcttaaaaatccttaaattataaattgttgtttaaaagggaatttttagaaatgatcttaaaagcctaaaagagaagatctaattttaatttgctaaatctcaatataaaattgggctagataaaatttcattaaatactttgcttaattctataattcctagatttttctgggatttatttgagctaaggaagtatttttaataaatggaattgcatttcatgaataatttaaattgaaaaaagtttttaaaagtctcttttggctttgggccgaaagtcggcccaaaacctctctctttctttttccctccccgacccagtcggcccagtccgccgagccgccgctcttctctctctcccgctcgctgacaggtgggtcccacttgtcggactcgtcgtcaacctcgcgccgccgccgccccgaaaccctagccgagccgcgccgccgccactttccaatccggtcgatcctttccgtttccggtgaaatcgtttgaggggaaataatctcctcgatctcctcttccttttctcttatagaaactccggtcaatttcctttggaaataggcggattcgagtttgattcggattcgtttttccccaatctttccttctcgtcgtggtcgccaagtcgccgccgtcctcgtccgcccctccgccgttgctgtagaccgccggagcaccgccgtcaccgtcgacccgatctccgccgccgctttttcctcgtcgccggcgccgtccgttgctcttccgccgccgttttggtcaccggtgagttcgccgcgtcgccctctatccgttggtgccctccgttcgtgccgtcgcgccgtcgttcgcaggcgagcttgcgcgcccgagccgccgccggtgttgacgtcatcgctgacgtcatcgggaccgttcgtcgtagaccggtcgtggaccgttcgatctcggccgtccgttttggatagggttaatctcggccgtctgttcccatgaaccgccgccgtgcacccggtccaccgcaaaccctagccgctgacgcaataaacctcttttccttttcaaaaataattcattattgcgtcataattcaattaaaatccatataagtgctttaatccgatttaatctttaaaaattcataactaattcattgtaactcagtttaatgtggttcaagttgcaaaaattgtataaaataaagatctacatattaaaattatccataaattgaattaaatttatttaattctttttaaatgggctttaattagatttaatcttgtaaaattcataatatattcatttgaagtcagaatgaagccgttcaagtctcataattcatctaaaattatgatctacatgtttgtttactttatatgtattgtttggtttttattagtctttttcttcgttttgcgtgttagcttgtcgttttcgtcgttgcgaaggttcgcgagtgcgccggaagtgttcaagaagattaattgaagaccgattattgcaaggcaagtcacacagatcctaagcacaatcctttgagcatgttgatcctatatttaaattctctatttatttcaactgtgcatttattttcgaatgtcactgggtggtgtgaatctattcctttgttatggccaatttgcattgattactttattccttgataccttgggttgttataacttgactagttgagctttatatattggttcagctagatattagatgtaattgcttagccatgcttagaaacattagcacactattgggataacttatgactcattattatttaaggatggcttaatgatacttcacgatggtcaatcgtgattggttaattaattatttgccaactaaaacttgataatggtgggttgtgagcacatggttttgagagtcgtgctcatgacaattaaggaccggttcgcgagctactattgtgaaacattaaccgtgccaaccacaagccagcgtgggcaacggctttaccttttgtataacatggttcattgcggagcaccagactgagaagtggcggagataagcccacgggggtcgctggggagtccatgccttgtttataagggggtgattatgatccaggaaaggtgcgctgtggtggattgtgttgtgcaaggggtattgtcacagctcctttccgagataccgtggtggtattgaggcacatggtgacatgttgtggggctgtgtcttgtgggtacagtggtacacctctggccagagtaaaactattcgaatagccgtgcctgcggttatgggcgagttgaacaatgtttttcgtgattagtctcacacctctcacaataattatggatgttatacctggtaataatttgcttagctcctggtttggagattagatctgtacagccgggtatggttgttcaggatggttgggcctgtgcagcatgggtgtgttgttcagtgttgattaaaatttctgattaattactccactgttttacttctcttaaatgttttgctaaatgctgcttttgcaaatgagcctatattatgccatcctttggtatccttgtgcacttgcatatttgctgtgtggcttgctgagtatgtcatatgctcattcttgcaataatcaatcaacctcagttgaagaaaaagaatccagaaggagaagacgtttggcttataccccagttgagctgcctgtgggagtggagccggagcttcgctagattttattttccgctgcagttttcttcatggtgaggactaagtgcctcttaagtaagtatttatcgttttagttaatttgatgaatctgtatattaaattgtcagtttgtgtacctcggctgattcctggacgaggattttatgcacaaataagatcggaaattactagtgaatttccggacgtgacaaattcagaattaaaaataagcaatattggaataagtttccatataataacccaatacgagattaattaaaatttaaaataaaaataaaataaaatccaaaattagaaaaggaaaagagagtccaattaggaatacaatttaaaaatagctgaaattcggaattaaaaataagtaatattaaaagaagagtccatataagaacccaatacgagattaataaaattcagaataaaaataaaattaaatctaaaattagcaacagaaaataaagaagagttcaagtaggattaaaatttaaaattagctgaaattcggaattaaaaagaagcaatattgaaagaagaaaccatataagaacccaacacgagattaattaaaatttcaaataaaattataataacatccaaaaatagaaaaactaaaacagagttcaagtaggaatacaattttgaaacaactaaaatttaaaataaaaaataaaaacattaaaagaacacaatacggtattaactaatttttttagaaaaaataaattctgaaattagaaaaaaaaagattttaattaggaataaaatttataaacaactaaaatttgtgataaaaataaaaactattgaaagaaaagaccatctaaaacacatgacgagataaattaagtaacatgcctataaagtagtagagttggtggcggttaatacggcatataaaaattgttaataaaacaccaaatataatcctaatgaagattaaaagaagggacgtcaggcaggccgtaaagcaaacaagtaaagcggttgccgggacttttagaaagtataaagaaaaaaaatccacattgataatcatttttgatttttaaaatctcaatgacaataaaaaggagaagcagcgagcggggtgtataagagtatagttacagagcctccgacggttgacgggacttctagaaaataaaaaatgaattgcaacgatagttatgttcgatttttagaatcacaatggcaataaagagtaggcggcggacgggctgcagaggggcacagtggcatcgtttgatgagacttctaaaaattataaaaaatgaaactacaagtccaatttttaaaggttcagaacttctgaaaagtaaaaaataccaatgataatcatgttcgattttaaaatctcaatgacaataaagaagggaggcagcaggcgagccgtagaggagtacaatggcaaaaccgctgatggtttgatgggacttctggaaagtaaaaatgaacccaaactataattatgttcgatttttaaaatctcaatgacaataaagagaagagatagtggacgggctgtataggagtataatgacgacgtttaacgggacatatagaaattataaaaacgaaacccaacgtggcaataaactctaaaaactataaaatccaatttttaaaggttccaagaatgaatagaaatagtgatagatcgagcaagcaaataaagaatgagatgacataaggggtagcaactggtgtgatttttaaaactatataattagaaacacgagaatgataaggtttggtctttcaaagtgttaacaatgagatagctatttaataaattttaagtaaatcatacttaaaaaaatatatgattttttttgctagtttatactaacagagatatgaccttgtcgttttctccattgaatatatgtagtcaattaaagcgcaacatatattgtgcatgaatcaaatcctttatatggtatattgccgagtacgtctttgtgaattgtgatcactcacgatacgctcccatccttatttttaagaaaaaaaacattttagaaatacatattaggttcgacacggccacttgttatatgcttatgcatagcagcgacaaattatttagtagcccaactaaatattaataacatggatttgattactagaaaaaaggaataaaaatttctctccaattccattttagttacaggtggtaaaaaaaactgtgtgctttttttttacattgctttgcacttttggggacaaggagaaattacaaaggtagtatgcacaagcatggaaattagtgtgtgaccaaatggtggtgcagtttgtgcatctaatataccagagtttttatcttagatttgacgttggtgtctagaagtaccaacttattagtggataaacaaccatgcactgtctacggacaaactctttgatcatcagcctggcgagtggtattgtttttttcgaacggttagaccattgccggtgttttatatgaagaagtgtcccattttaaaaagagaacgggaccaaactatacaatgcacagaaaaaactgggtacaaaccacgactatcaagacatcccaccaactaaactaagctaccaaagaaacgagagcaggacaaccaatctcaacactcaacaaaaaccgttcacagtaacatgcaacaagctaaaagaaaacaaggctcccatacactggcaaagacgtagcgttatcgtcatcacaccaaaacttgggcgattacgacttcgtcaggaacaccagggtcataacaacaacctagcccatgccaaagcgcaactcaagtcggctcatgtcatcattgccacaagtccaacttcacgaccaccagtctcgttaaagcaaggcctagccagattgacaaaccttgcagggcgaaagcttgttaccccataccagaacgaaacacaagagacgaagtccaacttggatcatcgttgccaagctcacaagcacgaagcagctccgactttccaagaggacaacaacaaaaccctacccaaaaccaagcaaagctacgagtcatcattgccgagctcgtcgatcgcctcgacacagtagctccaactttccgaaggccctccttaggtgtcaaagcagagccaaactagagattgcctcggatttccagagaaaccgaacgcgatagaacaggaaggcaaaaaaagacgcctccaaggagagaatggtgcccgcaggcattgccatctgtctttcgccttggtctccaccgacctaccaacttgaaggtgatcccactgtcaacactgcatgcgctcgtaggcatgttagtcattacagcacaccgaggtggccttctttcctgcactgctgccaacacctccaagaacgaaaaccgctgccaccactaacagagccggtgagacctaggcatgggttgacctgccacccctagctccgcctccgatgccaaccagcaggacgaaagtaccgccggtgcgccggagaggagcatgccgccgagatcctccgttgttgctgccgctccactgccaccgacatccttaggacaatcaccaccattgccagctggccccggggagctttgccgttgtcaccgccgccccatgggccgggaggagcctgggagcactcgtcgtcggtgtcgtcgttccttcacctgccggcgaccccccgccaccaccatcaccatgtctaggagcggaaggcccatatagtggctcaccggagagggggagctcctctaacccgccgagtgggagctcctcctctcaccgctgcatggggagatggcctccctcatcggaagagggtgccagatctggccagtggagcgccaaatccgccggcggccgctgcgacgaccccgcagccatcactacctcaaatccacgcgccaccgtgctctccccgccgcctttcctcatccacttccgccgctaccgtccggtctgtcctcgcctcctccgtcgcctgccgccctgccagccggtctctccccgtttggatttgaccatggaggcccggatctagatggcgcagcgacaactccaactccgagctgtcgagggagaagccctaccgccgccgtcatagcaggcaggcgactttgctgacaaccgctcaggcgacgacgaggctggtgagagaagggaggagggttgcggtggccggcgctgggtgtcgtccgtgtcatcctggggagagtgatgttgggcctaaacaattcctcaccactgaattcaaatttcaccacaatcttagaaggttaattgatagtaccatcttgttgctccaaaccgtatatactaaagagaatcgaacgatccatcttgtggataataggtatatatttctagtggagtcagctattggtatgcgggtgcactgccacctcatatttcaactaattagattccatgttgatcaagaccataatcaaacttggaaaaaaaattccttcatgttttagaatgcgctgaaagataatatattgatgttagagtaaaattaaagagagttacactatagaaaatgattaatttttgcggatgaccttcctttcttttcgcaggtagactaaaagaacacctttatgaaaaaaaaacaaaaagttgcctagtaacaacctttgtagatggatctcttaaaaggtttgtctgtacaaatgggttcatcctcgcaatcgaaccggttaataggcatgtatgcaaccgccctctttttttcgttctctcccatgcaggcccgaaaagggtaatgggcgaacgtttgccataagttgatcccgcgaatcagaagggggaaattggaggacacgtattttcttctgttttcagtttcatttttccttcttttacatgatttttctaatccgttgcaaagtctcaaccatctctttttattttctcacttcggtttattttcagatttcttttttttcgttatagtatttttatagcctttttaatggaaatttttatataaacaatctgtgataactttctatatatagaatttttatatatagagactttatatatgtaaaatttatatacatatatatagactttgtatatgtaaaatttatgtagaaattacgtgtgtagttagaaagtttagtgcatataaattttactagaaataataaaatgaaatttttaaaatgtataatatccgtggaaaatttctatgtacagactttctatatagagagactttatatatgtaaactttatatatatatagattttgtatatgtagatttatatatatatatatatatagattttgtatatgtaaactttatatagaaattatatctataactagaaagtttagtgcataaattttattacaaataaaaaaattgctgatcatcaccacatatttctcaaaaaaaaatccaatccgaacaaacctcctaaccgaaaaaaggataaaacaaaacattgatttttttccacatcgcgtgaaatggaaacgggaaatgttttcctccttttttttttgctgttttctattcgccgctagcgaatgttcgtgcattagacttacccaagcaggcctgctttttttttctttttttataagtactcactctctccatatcctctacttctatctccctctctccgggatacctcggcctctcctcttgctccctccatcttcttctcctcccctctcctctcctctcctcccttcctcgcggccatgacaagagtagccgacgggcacacatcaatgttgttgtagcagggtgcaaacacattttcctccaattcggtcaaaacactacgaggttttgcaagacctaagtatccagaggggaaaacactcattttgagtggaaactacctttccaagaggatgaacaccttcccaaaaggaaaataccttcccagaggaagaacactcattcgaatagaaaatacctcttcgggtgaagaacaccttattagggacattccataatcgctaatacaactacacatattttggacaagttacaatttcacaggtgttttccaaggatgaaagagaaggcaaagggggaattcgaattcccaggaggaagaagacggtccaggacggcaaatgcatttttcccaagagttcgaggaagagcactaaccgaacaagagaagatgccaagggaagattccctggggaccaccttcaaccactctcgccagctagcacctaaaagactaaaaggcccctggagatgtactagaatgcccccacagacgctgatgtggcaggggcattagagtaaacttacaaagacccacaggggtaaaaatgtaatctcacgtgtacgaccaccggttataaaagccagtcaaaaacctgtagcaggacaagacatcttgaatacaaaagtaatcctcaaaagttgtgtttgctgttcgagctcgtttctaaggataggcgggaaaacacttctttccggcctatccccgatcttgttcgtgacctaaggtcacaacagtggcgccgtccgtggggacggaaagtctccattgaattgggctcaaacagtaaatgcgacgttctcaacgacagaagactgtgccagtacgctatacaggagcttttgcaagcgcgacagctgcactcgagagagagtgggaaaacgcagtggaagaaagtgacttggcaagagcaacggaaacacttgataagcagtgggcagagatggccaagacatccacagcagcaggaggtaatgaaacaactcaagaagaaagaattgctggtgcggtggtggaagaaacagggaaaacacccatgaatgatgtagagcttgctgaattggtccaagcgcaaggggctgtcatggtgagtaaaggacaatatgaggaattgcaaaaagagttacaaagattgcaaaccctacacaatcagacagtaggagcaggaggatcaagtgatcagtgtgcaataccaggggctagggaaaagcaatcagatcaggcaaaaggagatgcccagggggagaacaaagaaggagaaagtatcaaagccactcaagctcaagatctaccacgaacccaagctcccagtcaagtacaaaacccatctcaggctcaaattcccattcttacccagaatacacctcaagctcaaattaccattcctactcagaacctagctcaaaccttgatccctagccaaaaccaaattcctattcaaacgcacatttctttccagccgcatattccaattcaaactcaaaatcctaaccaagtacaatatcctcaaacacaattacatcaaacccacccagttcttcccaatcaaatccaaatcccccaacctgatatcctacaaagtaatatcccacgaacacaactcccacaaaatgatacaccacaaatacaagttccacaaacccaaataccacagattcaaacatctttgcccaacttcacacatacgcaatcaacaaacactcaagcagctcaaaaccatcaccaagtcccccaaggtttttcccttttccatatgcaacaaccagagatgatgtttgaacaagggtacatcccacaaatggccaaccatatacaatatgcaggtcaaataccgaaccaagcctttcaattccagcccacacaaccctattttcaaccaaccagagcaatagatacaaagaatcccttaagtcaaaacctgcaaatggcaccttggccaataaacttcaagttgtccaacatcacaaagtacaaaggagacacagatcccaatgaatacctcagagtatatgagacagcagttgaagcagcaggtggagatgataccacgaaagctaagatactcccaacaatgctagaaggagtagcattatcatggtacactaccattccaccaatgacaatctattcatgggaacatatgagagacacctttcgagcaggattcattggggcgtatgaagaaccaaaagaggcagatgacttgtatgccatgaagcagcttccaggggaaacattgagaagtttcatcgtgaagttttcaagggtaagatgtcagatcaggcatgtagatgatgaaatgctcatagcggcagcaaaaagggcattgctacccggtcctcttcgttttgatcttgctagaaatagaccaaagacagcaaaagacttgtttgaaagaatggaaagttttgcaagaggagaagaagatgagttgagagtgcaagaggaagaagccgtcttgttgggaaaaaaagcaatcaaagaacaagcaaatttcccaaggggaagaacaaaagggagagaataccggaaagccctggaaaaagttcaagtatgactataaacaagatcagaaaaaacaggtaaattttatcggagatggatccaacaatgaaagagaaaaaagaaaacatcaatgggacaacactcgcagagggagaaacaattgggggcaatctggaaaaggtcgaggacaatggtggaattcaggcagaggtagaggacgatggtggaacaatgaaagaggaaaaggaagagaaaataaacctgaccaaaccaaattttgtcaaacacatggaccaggaggtcattccacagaagaatgttacagtaagttctgtcatatacatggtccgggaggccattccacagaagaatgcaggcaaatgactcacttgttggaaaaacacgtaaatcgatatgagaataagtatgaaggagctcgtgatcaacaaggacaaaacgccatagaagcaccgcaagttatgaagatagaggcaattgaagaagtgccaaagagagtgataaatgccataactgggggctcttcattgggagttgagtcaaaaaggcaaagaaaagcatatgtcagacaggtaaatcatgtcgggacaagctattagtcaaatccaccagtatactcaaaaacggtaatttcctttgggcctgaagatgcagaaggaatacttttccctcatcaagatcctttagtggtctcagtggaaatagcacaatgcgaagtgcaaagagtgttaatcgatggaggaagttcagcggatgtgctgttttacgatgctttcaagaaaatgcaaataccagaagataggttaacaaacgcaggagtacctttacaaggttttggtggacaacaagtacatgcaattgaaaaaatatctttacaagtggtctttggaaaaggcactaatgtgagaaaagaagagatagtatttgatgtggtcgatatgccatatcagtacaatgcaattcttggaaggtcaacaatcaatatttttgaggccataatacaccacaactacatatgtatgaagctcccaggaccaaggggagtaataacggtccgaggagaacagcttgcagcaagaaagtatgagcttcaaggaacaccaagtgtgaaaggagtacatgtggttgaccaaaaacagggagaatacataaaaatacaaaagccaattcctgaagggaaaacaaagaaagtacagttggatgaacatgactctggaaagttcattctgataggagaaaacttggaaaaacatattgaggaagaaatcttaaaggtagtaaaagaaaacatggctgtatttgcatggtcaccagatgagttgcagggagttgatagaagtctaattgagcacaacctagcgattaagtcaagatacaagcccaaaaaacaaaaattgagaagaatgtctacagacagacaacaagctgcaaaaattgaacttgaaaagttgttgaaggcgaaagtcataagagaagtgatgcacccagaatggctggcaaatccagtgttagtaaagaaggcaaatggcaagtggagaatgtgcattgactttacagacctcaacaaggcatgcccaaaagatgattttcctttgccacggatagaccagttggtagatgccacagctggatgcgaactaatgagtttcttagacgcatactctggctatcaccaagtttttatggtgaaggaggatgaggaaaagacatcatttataacaccatttggaacttattgttttatcagaatgccatttggtttgaagaatgcaggagcgacttttgccaggctcataggaaaagtcttggctaagcagttaggacggaatgtcgaggcatacgtagatgacattgtggtaaagagtaaacaagcatttacccatggcaaagatttgcaagaaacatttgaaaacctgagaaaatgctcagttaagcttaatccagaaaagtgtgtttttggcgttagagcaggaaagttacttggtttcttggtgtccaaaagaggaatagaggcaaatcctgacaaaatcgcagcaatccatcaaatggagccgccaaaaaacacaagacaagtgcagaggttgacaggccgaatggcatctttgagtagatttctatctaaatcagcagaaaagggattacccttcttcaagactttgaggggggcaaacaccttcgagtggactgctgaatgccaacaagctttcgatgacttgaagaaatacttgcatgaaatgccaacattagcaagtccgccaaaaggtcaacctctgttaatgtatgtggcagcaactccagcgacagttagcgcagttttggtacaagaagaagaaaataggcaagtgccggtatactttgtctcagaagcattacaaggaccaaaaacacgatactcagaagtagaaaagttgatttatgcaattgtgatggcttcaagaaagttgaggcattattttctgtcgcatgacataacaataccatcggcatacccgataggagaagtgttaacaaacaaggaagtcgcggggagaatagcaaaatgggcaatggaactcttaccttttgacctgaaatacatatcaagaacagccataaagtcacaagtactagcagattttgtggcagaatggactcccaatgaggtagaacaacaggaagaagtcgaaaaaccatggatagtattctccgatggagcatgcaatgccgccggagcaggagccgctgcagttgtgaaaacaccaatgaagcaaacgttgaagtattctgttcatatagcttttccttcaacaaacaacacagcagagtatgaaggcgttttgttggctatgagaaaggcaagagcgctaggggctcggcggttaatagtcaaaactgactcaaagttggtagcaggtcacttttccaaatcctttgaagcaaaggaggaaactatggctaaatatctggaagaagcaaggctgaatgagaaacatttcttgggaataacggtaaaagccataacaagggaagaaaatggagaagctgatgagctagctaaggcagccgcaacaggtcaaccattggaaaattcattttttgatataatcacctagccaagttatgaaaagaaagaagtagcatgcatacagagagaaggagattggagagaaccgatcttgaaataccttgtcagtgcacaacttccagaaaaggaagaagaagcaaagagaatacaactaacgtccaagaaatacaaagtggtagagggacagttgtataaaagtggagttactgctcctttgttaaagtgtgtaacaagggaagaaggcatgaagatggtggtagaaatacatgaaggcttgtgtggagctcatcaagcaccacggtcagtggcttcaaaagtcataagacaaggaatctattggccaacaattatgaaagatacagagaaatacatcaagacgtgcaaagcatgtcagaagttcggtccaatgacaaaagcacaacccaaagaactgcaaccaattccgccagtctggcctttttacagatggggaatagatatagtaggtcctcttccaagagcgaagggagatctgcgctttgtcattgttgcaattgaatacttttcaagatggattgaggcagaagcagtggcaagaataacttctgcagcagtacaaaagtttgtttggaagaatataatatgtcgatttggaatcccaaaggaaatagtatgtgacaatggaaagcaattcgaatctggaaaatttcaagacatgtgtaaaggccttaatttgcaaatcaactttgcctctgtaggccatcctcagacaaatggagctgtggaaagggcaaatggtaaaatcatggaagctatcaagaagaggttagaaggatcagcaaaaggaaaatggccggaggacttgctatcagtgctttgggcactaagaactacggtagtaaggtcgactggcatgacccctttcagattggtttatggcgatgaagcaatgactccaagcgaagtaggggcacattctccaagaatgatatttgaccaaaaagatgaagaaggaagagagataactcttgaaatgctagatgaaataagggttgaagctttggagaagatggcatcatacacagaaggaacaaagagctattacaaccaaaaagtaaagacaaggccgattgaagaaggagatttagtcttgaagaaagtgctcaatgaggtagctgttggaaaactcgagtcaaagtgggaaggaccattcatagtcaaaaagaagacagaaacaggagcattcaagttagcatatcttgatggtgaggagttaaagcatacttggaatgctatttctttaaagaaattttatgctaaaaaaaagaaaaaaaagaaaaaaataataaaaaataaaaaaaaagagaaaaaaaaagaaaaaaaaaagagagagagaaagagaaaaaggagaacacgggagctcgagtttgtagtatactcactcagatgtaaatacgaatgatttccaagttaatgtatataaacaggacgtagggtttttatccataatggaggcccgaacctgtataaaaaacatgcctctgtgtatgattgcaatagaactccgcacgctcggagtcaaatactctcgactaacaaagtcgacaaaatagaactccgcacgctcggagtcaaatactctcgactagcaaagtcaacaaaatagaactccgcacgctcggagtcaaatactctcgactaacaaagtcaacaaaatagaactccgcacgctcggagtcaaatactctcgactagcaaagtcgacaaaatagaactccgcacgctcggagtcaaatacattcgactaacaaagtcgacaaaatagaactccgcacgctcggagtcaaatactctcgactagcaaagtcgacaaaatagaactccgcacgctcggagtcaaatactctcgactaacaaagtcgacaaaatagaactccgcacgctcggagtcaaatacattcaactaacaaagtcgacaaaatagaactccgcacgctcggagtcaaatacattcgactaacaaagtcgacaaaatagaactcctcacgctaggagtcaaatactttcgactagcaaatttcgacctcgtcactccttcgaaaggtgaggaggacggcggttttcgaactattttgccttagtcctaaaaccagctcaggaatgctcgaactctattctcgttcgagctcaaaaagcggaaaatccgcgtgacgaggtaaaacacgtttcgacctcgtcactctttcgaaaggtgaggaggacggcggttttcgaactattttgccttagtcctaaaaccagctcaagaatgctcgaactctattctcgttcgagctcaaaaagcggaaaatccgcgtgacgaggtaaaatacgtttcgacctcatcactccttcgaaaggtgaggaggacggcggttttcgaactattttgccttagtccaaaaaaccaactaaagaatgctcgaactctattttcccctcgctcgagctcaaaaggcggaaaatgcacatgacgagataaagtacgtttcgatttcgtaacttcttccaaagataaggaggacgtagtttacctaagggtgcttgaacaattgaaataaagagcatttataaagaaaagaagaaaggaagggtttatttgatgttaagaaggtataacaagttacatacaaactctacaaagaagaaagaaaagagtcgggataaacaatgttgagaggagaaggcattactgtatatggaactattgaataacgccttttccatattctacgttggcgttcggatggttggaagttttgccaaaaggctttactagcaagattattgttcgaacgccgttccctaaactcaagtacaaagtcacgtaaactgtcatgtcgatggcttcgttgccatcagaaaaacttaaaagcaaatatacaagtattatcataataggcttcgagttcgtcatcggagatggcggtcctggtagaagaaagctttgcagggtctcgaaatgctaagtgcttcacatttcgagtaggcaaagtgttgttgcgtcgaatcacaagttttcgattcgagttaacctgcagccccccaaagaaagggaatttccgtgaaaagcatgcaataagagaaaagcattatagtcagctacactataaatttttacaataaaggctctcaaccataacggttttgaagtagcaaaatagcattgttttcgaacatacgaagcatccttaactattcttttcacgaacgtcacacctgtgcgctcgagctcggagtactactgtctttatcttgttggctcgaactggccggctgtgactttaatcttgaggcaagagatgctcggagagacctcagggtatcttcatatcctttcttcttccagtaaagcacttggaaagcctttacgacgggttgagctgcatctcgaagctgtgcaaatttggcctcatcattaagcataccttgtatatcagctttaagggtggtaaagtgttcacacccatttgaaagcagacaggccgaaaggctctccacagcagttttcgagcagcgagatgcaaagggagtaacgctatcttttagcccaatggaaaattcctcgaaccattttcccacagctgctaaagtattttcttccgatagcaagctgatgtcagcccctagacttcgcaacgcgattcgaacggtctcgcaacttttcagaagaagttggcggcaactttcgttctcgagctctaaagcagatatcttctcgctttgatttttgcaggcgagtttgagttctttattcttcttctccaagacctcaacttgttccttcatcttgtcttctgattcagcgcgttgtcgagcgacgtcttgatactcgatgatttttcgctcgaatgctttttcacgagcgagtaatttcttcttttcctcagtaagcaacttcttttcttcggaaagctctttcttttcgccgcttaacttgcgcacgagatcggtggtgattttcttctcgtcggccattcgatcaagtttgcagcgaagataatcccgatccttttcgagtttagcgatgcgatcaagtgatttcttccgtcgcgtacaaatagctcgaagagctttccgagcaacaccacgttgaagacgagcaaggctcgcagtctgcgcatcagaaaataggttttaagtcaaaaaaatataaaatataaaatataataaaaataaataaataataaataataaaaaaatacctgtgcagcagatacatcaagtgctgcccaagaggacataagatcattttcttccaaaaactccttttcaagatcaggagtaatcagaactttctcgagttcatcaccaatcgaactcagggggtggcgatactttaggtcattcaaacacaagtttgggccatgatggctactttccccgagttcattgaaattaggaagacccataagccaatgtccatcttttgcacatcgttcgctaaaaccaccaagaacgttttgtatcagctctggggaaggggttgcgatgaacggcggtgacggaggtggagtggggttcgaactacctgtagttcgaacacctccatcagcagcactcttccctgcttcggacttttcggccgcattgacgggcgtttttgccttttttgcaaccaaatctctatcagctcgaagagggtttgttgtctcaacagtatcacccacttgggtcgaacaatcttcatcgacaaccgtgttggctggggcaacaacatacagtgaagctacttcttttgccgaaagggcaaaactagcatcagctcgaattagggtgacatggatggcagaaagatcaatacggatatcatcttcatccaactcttcatcactgtcaataacaagctacactcgtttagaactcggttcaggcggaggactgctggcagttttcttccttttcaaatcagctaaaacagtaggaggaggaactgttttgctatcatcagattcagacgagtcgatcgagttgtcgctcgaactgttactcgagtcgctatcatcactcgagtcgttctcttcttcatcagctccttcctcgccttcttcttcttcagcattttcttcaccaatttcttcgtcaacatcttccacttcaacatcatcatcagaagaagaagaagaaggcttcacagatttctttttctttagtttggggacaatttcaggatgaacccggacagggatatcggagcctagagaggcgaagacccgattttgccttttcccgttttgaagtgtcaaaaatttcaaatgctcatccttggtataagggccaagaaatttccgaactgggcggaccatatcctctggaatcacaactacaaggaagaagataacaaagggagaaaataaatcttcttaactaagtcactttttcaagaaaaacaaggttcgcaaaaaatcaagttcgaaaaggaaacttacgatcagacgaaaccacaaatggaggaagactggaagggcaatcttctgggatttctccaagagtgatatcccagccgctcgaaagaggtctaattttgagaagaacaaactcttccaccaggtctcggcagctaaagttcaaaacaagttcttcgattcgaggttgtatggcagtgaactccggcgacaaagagactgatggctcggagacagctttcggtttcttcccagagaacgaaaaaggacaatccttatcattcagcaggctaacagggatttgatgataaaaccacttcgactgccacttgttcccccatttttctcgaatagcagacacagctggccatggacttccgcgcttcggatgaggagcaaagtttacacacccaaacttcgagttctgtttggtgtagtgccgagtacaatggaagtatgcaaagtcttcagcttggagagtcccaccgcagcttcgaaccatccattcgaaaagcccaattcgaactaaagcattcggagtcaattgaggaaactcaagtttgaacaatttcaggacctcgaccaaaaaagtgcttcacgggaatttaaacccggcgtagaagaaatcctcaaacacaagagtgtatcccagcttgggagaaggccttgattctcccactggtcgaattacaacgtttcgaccagatatccaaccaacatcaacaagatcgtttaagtttttgtccttaatcgaagaggcaccaataccacaagaagtattttcgtggtttttttatttcttggacttcgacttttccgcagttttcttgtttttccccatgttgtgtagtgagaaaggaagaaatcaagcaaagcaccaaaactcgaatggaagaaggaagaaagagatttagttcgagtcttttgtgatttcgagttgatggcagaacaaacgagtggtggcgtaggtcacgtgatagcgacccctcctggccttatatagcgcagggtggtaagggtcgcgggtttacgagcggacacgaaacccgaagcgacgcgaccccttaagcgcaccaatgaaataccggcacgtggcataaaaaaaacatttaaaaataataaataaataaataaaaatgaaaaataataagaataaaaataaaaataatgaatagtaaacgtggcatatatgcatatttgaatagtgtgtttcgaccgaataggaggacggcggttttcccccttttttccataaactcaagcacggtttcggccgaaaacacacatcgcccttacccgtgaggggcttgttgtagcagggtgcaaacaccttttcctccaattcggtcaaaacactacgaggttttgcaagacctaagtatccagaggggaaaacactcattttgagtggaaactacctttccaagaggaagaacaccttcccaaaaggaaaataccttcccagaggaagaacactcattcgaatagaaaatacctcttcgggtgaagaacaccttattagggacattccataatcgctaatacaactacacatattttggacaagttacaatttcacaggtgttttccaaggatgaaagagaaggcaaagggggaattcgaattcccaggaggaagaagacggtccaggacggaaaatgcatttttcccaagagttcgaggaagagcactacccgaacaagagaagatgccaagggaagattccctggggaccaccttcaaccactctcgccagctagcacctaaaagactaaaagacccctggagatgtactagaatgcccccacagacgctgatgtggcaggggcattagagtaaacttacaaagacccacaggggtaaaaatgtaatctcacgtgtacgaccaccggttataaaagccaatcaaaaacctgtagcaggacaagacatcttgaatacaaaagtaatcctcaaaagttgtgtttgctgttcgagctcgtttctaaggataggcgggaaaatacttctttccggcctatccccgatcttgttcgtgacctaaggtcacaacaaatgttgtcgatggtggattcagcatcaacgacggattcaaccaccctccctcgcagattcggcagcgacatatttggagtcatgacgacaacagcgatagggaggggaatgacggcggcggcgacaacctcaagacgcctcttccacacccgccgtggatcccgccacctctcccctactctcacatgtggatccgtcatcaatgacaagggaagggacagatctggtggcctctcctcctccgtgcagatcttgccgcctctccgcccccgatgcacgcggatccgccggtggcaacgacaggagaggcggatcctacggcctctccttctcccgtgcagatcccgccacctctctacccccacgcactcgaatctgccgccggcagtgataggagaggtggacccgactacctcccaatacaacgacaacatcggtcggcctcggagggaggggggcatgatgatgtggcgggtgaccacgacggtggactttgggcagcaggggttccgtcgctggggatgacactgttttggcgacgggtaactcactgagcacggatcgacacttggattgagctagggtttctacaatgcttttttgaaaatttcatatttttttgcgtaaaaaatctttttgcagccggcatcatttcatgcccgcttgcgaaaatctgtttttgcctatggttgttttgcccctctacaaaaattataattttgtagacacctagaaaatagtgaattttgaccgtttgggggaacccattctatagtagtgttaagagtcggaaaaggtaaatagtttttcctatatcatttgtattgtacgtaattaactactccctccattcgttgtgtccaggtatatagctaaataaaaataacttttttatagatggatgaagtatttattatcttttaaaaaggctgaaattaagacatgcatttatttatgtagatactagctagctagctgctataaacattgtaaccagacgatattgattacttaattaattaagaaaatacacctcaaacagcaatcattataggccacaatttgaagctgtgcatggacctttttaaaatggattcgataacattatatattgtcccctcctgtaccattgacacaaatctctgcaacctcaagccctcatgcatgtatgtcataatatacactaattaggacagacaatattttatccgtgcactctaagtacctttgcacctattaaacaaactccatcatgtgttttgttagtttctcaatcatttgacatcagatgctcatactttaatttattccctccatctagcacacacaacgaatattttctttgcttgacattttttgactccttcctgttcattagtacctataaatggaatttttaatactcaagtttcattgttttcagctgaaatagatgccttttgatttggtgtttgcttattttgttagtatcctatactatatagattaattaatggtgcatgtcaaagatcctccactagcccacaatttctggtccttgctccccaggccagctcactgatgcagcctgcgaatttgtaattttccatactttcctacttcctttctgggagggcttgactcaagtcactcaacctatataactaaaagctgagaaatggattgctcctcctttctttgccacccttttcttctaatagtgatcccaaattcaaccctttaggcctttaattactggagcgcatgcaactttaaacagaagaaaaggtagcaacagaacacatgtaatgtgtacaccaaactagctgatgggattaatgtctaccaaagaagtaaaatgacgtggcctctgatatatatacatgcgtccaatgacgctaactagctttacttgcattgctaattaatttgttgcaagctatatattagtttacctccaaaaggtcgtgtgtggctgctgagatgcactaaaaagaagagatgttgtaaaggaaaggctgagtacaccgagcattgttgtctgtcttacctgtaacaaccaacgacttttgctttttatcattcgtccatgcatgttagctcctattaatctaatgtaggacacgacgatgaacagcaacacattttattttctgttgctcaccacctagcttgaaacacccaggtttggggataatctctccctgtggagtgaaccccagttaattaacttatgggtaagatattggggataatcttggtagctcattttcgaccgccaaagaaatcgtatggctgtcaaggacattccgttttcttgtagtgttatcctaaagaaaatatttttgtgtaataaattataccattttctgttttgtcttccctcaaaaagggatacctgttgttggtaacaaatgaaccttttcaggcgcctctgctgcattaagctctttatctagtaacagctaaatgaagcaataatacagtgtggtgaggatgcactcaaaatgtagcaaaaaggtttggaggggaactgtgtacgtttctaatataaattaagatgaacgacgatgattgtacccataaggatgttcatttcgagaactagtctcatccgcctcaactaaaactcccggccacaacaaataggtcataaatggttttctagatgcatgcatgagctgaatgctatagctgcctttctcttaaagaaaaaggtaaaaatcaatatcatatatgcctttaattagttttgactaatgtcccttttcaaaaacgtatttcaagaatgaacactgacccctaaaaaaaatgaacactaccaaaaactttaaccagaaatggatctcaaccttaacgtcaatcccgatagcagtgaggtccaacatctcaacgcttggattactagcgctaaccccctaccaccgtggagtccaagttgatctagttggccaccgtgtaggggatcagtgccatcgatcttggtgttgaccttccgactcaatgccagtcctactagtgtggaggttaggacttagcccctcgtgtggtgcctacacaagaccgtggatatggaatatctcctcgagatgaaggggtgggctagagatcatgttggatgtgacgaagagcaaaagaagaagacaaaagaaaacataaggagaaggaagagcgtgaggtcgaaagggaggggaagtgcaagagggcatattgagctatggaaaccgatccaaaggctatggggaagtacctaaatcctaaacccttacaattaatccacatctcttatatccacatttctattgatcgccagcttgttgaatcgtgtttgcaatatctacttctcttaatatttgtgaaaattattttccatgttcctagctagtttgtgtaatataattggactagctcaccatctgcatatggatttgccaaaacttgttctagaaatataactgatttccatccagcctaaaagattttagaagctgggctagccctccttttggccatctctatccttgcagtcatgcataaatataagagtaataaattccatcaccagctaagaggtggctgacatgtattttatatgcagacaagagttaattcatgttcctcacatgtataggaaagtttgaaatatcttcacgaaagaatattccaatgagccaatcaaggaataggtacatgcatgtaaataaggatcaacatgtacaaagaaagacgaagggggggggagctggagaacaacaattaattgtactactcctgctgctttacacatataacagatcgaatcagcagcttgctggtcgtattcggtaattttaaattgctcaaagtgaaccagaaaaactgaaaaattaaggatagaatagcatggtcaacgcaaagcaactgtgatagcctaattcttgtggtgatctacatgcacctatggccacgcatatctcctacatccatatcttcaatcatcgatctcgtgatcaatattgttgtgggcttgtggcaaacatggttgacagggaggtcatgagagatgtgcagttagccccacaccaaataaaatggtcagaggaaaaaagttagggttttggaagggctagctccaggttgggaccctaagataagtaaaaaaaaaaaagctagtaaaagggggaggggtaattctatgcattaaaggacatgatattgctgaaggaactcataattaatggtacttaaatcaacccatacaaggaaagagacgtccaggtgccttaattcagcaggtcgtaagattggagcaagttagcattgcatacacttgaagtgccacacccactggagttcttattaagatcctaaacgtctttccctgcgaccgtataaatatatacattgggtgtattacatgtggcaaattaaatgatataccgcgcgcgcaaacttcaaaaaaacaaggtctttcctgtaggacactatataaatataagttttttttgcggggacactatataaatataagtttactggtggatactcttacttcttgattcttcgtcaacagacaccagacgtattatccttcaaccgttcttcagcttggtactattctcaagtatctactctcttcctctgcatgctcgattctgccctgccgcttcctctcatttccatttggcccgaactagggcccgctccacctcatcaccatcgatttggccattcacctcatttgtatgtcaaaaatggcaaacaaatgataaaataatacatattaattgtgcctactgacaaagaattgcaaagctagagtgtccactaacaaatctatatttttacagtgtactacattaaatattgtttctttattgcctcgtggcgaaatttttcatatgtatatattgtgagtaattttacccttaagaagatatcaaaagttaccatattttctagtgtaaaaattaggaaaaattttatggcccttgacaaagtacctcaaggtacttaaattttacattaagaattttagtaacccaaggtatctggtgactggaggtacccggttttataaaaaaaatatggtatctcccgatacattctcaaggatgataaaattacctaaaacctgatacctcctaaaacctgatacctccaggtattacttatctcaagatttgtataaaattttgatattttcaggtactttctgaagtacgataaaatttctcatatattgtagaatatccttgtgtaccattaagattaatcgttctttggttatccgattgtttggttgtatgccgtatggcagtgatcgggaatataatatatttctattatctaagaaatatatatgtgataggaaactcagagcagaagctttctaactatataaacacatgctatcaccttttttttgttgttgcttttccctcctgtattgtttcattctgtcccaactcctagttcaagttgtgtatggcatgcatataagatacttgtgtgcacctggtccatagcagcagaaactagggcactagagattctaaggctggcaaacaaaggagatgagaggagcaaaggccaaaaggcaatggaatgattactggtctagctggccctactttattaggagtacctctttctttttgctccctgctcttccattattttccaaaaaaaatgcatggttttcatccgaaataatcaccaacattgaatccataatttagaaggtcaagggactaaaatatcacacctaattaagtacatgtatacatcatacttacaacttacaagaaaagatatgggctttaattttgtgtgggaagaaaaaaaagaaaatctcctttgctggaaattctcaatgtttattttgacttggagagtggcgccaacagtggacagtgcagtctttggggattgaatgaatgataaagagcaccgcacgtggagcgcctgagccaagtgactctgcatctgcacagtttaaagatttttccttttacaaaaaaaaaataaagagaggagcagaagcacacagacgaaggagaaaaataattgaaaaaaaaaagaaacacatttcaaacagcaaaagggaggcagcaaaaaattaaagagtctggggtgctctcatctcatcaaaagcagccaatccagaaaggaagcatataacattgctttccattcaattctctgaacaagatatatatagctagtttctcttcaccaccagttaatcctccggaattatctcctgcttagcttattatcatcttgatgatagatatatatggagagagagagagagagagagagcagtagagtagtgaggcatatacacgtggtatctgagataatttggtggaatcgttagttagcaacggggaaaacacatcacgttacgctctgccacagtactgatgaacaactgtgcatgggattagctgctagctagctcctcgctaggtgaagctaataatttccccgctcccggtcggccccggcctctctccctctcctcctcttcctcctccccgcgcgccttatcctcctctctctctctccatctctctcactcaccggtcgccttccatgtacaccacctatgccctctagtctttctccagcttcctctctctctctcctcaccttcttctctgcctcctccaacatcaagaatccatttattcattcacccatctctctctcctcctcctccatgccctacaaactacaaagtacacttcctcttcctcctccaccctctccctctcccactccagtggctggcctggctacctagccacctagggtcatctgctcctactctctagctctctctttctctctctaagatcacccggccggccaccagctggggatgaacctgaccaaaacaccataaaatagtgtgtgatctccccacacgcacacagaagctagcagcaacaagcttcattcgcctcaccctctcccatcatatcatatgaggaagcaggattctttccaacctacaatatatcttttccctgatggctagctagctctttctcggactttctttctttctctctctctatccgtctctaccacatcgcaccacctaaccttctcgagctagacccacccacaacgagagggaggcaggcaggccgcccggagacatcaaattcattctcctcttctcttccaaacaaccacctcacttaccagcctaaaaaatccaatcaaagagaggtatagttggtttatatctgtgtatatataccatggcctaattgatgaccatggacgtcgccggagacgccggaggtggccgccgcccaaacttccccttgcagcttcttgagaagaaggaggagcagccgtgctccagctcggctgcaggaggtggtactgggccatcatcggcgggtggcaacgggaacaatggatcgggaccgggcggtgccggaggggagatgcagctgcggaaggcggcgccgaagcggagctccaccaaggaccggcacaccaaggtggaagggagggggcggcgcatccggatgccggcgctgtgcgcggcgagggtgttccagctgacgcgggagctggggcacaagacggacggcgagaccatcgagtggctgctgcagcaggcggagccggcggtgatcgcggccaccggcaccggcaccatcccggccaacttcacctcgctcaatatctccctccgctcctccggatcgtcgctgtccgccccggcgcacctccgcgcgttacctagccccgccgccgccgcccggttcggatcccgtgcggacgcgtgggaccgggttgtcagcctcgggttcccgtccgagggccccgcctcgtcgtcctcgtcgccgtccccgcttctgttgaacttccactcgggcagcgtcggtctcgatgtgcaaccttcgccttccgccgctgccgccgccgccgacctctccaggaagcggcgctgggagcaggaaatgcagcagcagcaacagcaacaacagcagcagcagcagcagcagcagcaacagtaccagcagcagatggccgggtacacgcagagccaaatgccgggcaccgtgtggatggtgccgagcaacagcacgcaaggaggtgggccgtccggtggtggcggtggcggcggaggaggcagcggggagtccatttggacgttcccgcagatgagcagcgccgccgcggccgccgccgtgtaccgggggagcgttccgagcgggctacatttcatgaacttccctgcaccgatggcgctcctaccgggacagcagctggggctcggcccagttggaggcggcggtggcggtggaggaggcggggaggggcacatggggatccttgccgccctcaatgcttaccggacacaggcggcgacggatgccgccggtcagcaaggcggaggaggaggtggaggaggatctagccagcagcaacacggaggcggcggcggcggcggcgagcggcatcagagcataagcaccagcgactcgtagggctctgaagatcgcgtcgcgtcgcatgcattggcccggtcggtgtgactttgatctgttctttgtcttggtttcattctttcttcttttgttggtttccttccactctctccctaggcaagagcttgcaaggactcacacacttagctgcattccatggcattcttacgtacgtatgctaggctagctagctacctgaacttgtgcttatgggtgagagcgaggtgatgatgcctgggaggatcaagaggagggaaacgcacgcagctgcatgcggagagattgttctttttgttcatttagctctagagtttgatcgagtgcgagcagaagagaaatttttttttatcaagcatggcaatccattatctgcatgccatgacgatggttcatttttttttctccacaattgctagttcagtagtaatactggcctctcccatgtttttctagctaggcactcaccattgatttttgcatgctaattgagtccgttggttccttgattaacatgcatatattgtcttagctttgatcgatatataacatcagtcaccatgagctagttagggttttaaacggttactgatccgcttccatatccgtgacatcctccgcgatcaagcaggcaaaagaaaaaaaaattgcacgtaacatacgcgtatagcaagtggccgtgtacagaaacaacgttccaaaactagccattctaccagcaggaggaggcccgatgaagaaaaacgactcaacgagacgagggaggctagctggctggccagctgcgtggcaatgtttttgtcatctgatgggcgaacaacctgcagagaagccaagctagcaaccgatggcgccgtggaccacagagagagagattgagaaagagagagagagaaagagggagaccgggcggcgcccgttgaggcgcggactcgagtccaacagtgacgacgaccaagagccacagcccgtacggtttcctttagtttttcgcgctcgctgccccgcgaggcgagccgtcacaatgatttccccccacgcgggcggagcgtacgtacctacgtgaagtacgcaccaagtcaccaccgcgcgcgatgcatcatcatcagaccgatcgatatatcgatccccccgacccaacgtcacggggcgcgcggcggctacgtgtactgcgtgcggcagcaaacacaaggcgcacgtagtacaccggtgcgcgcgagcagcagcagcagcagcagcagcagtagcagcaggcgtctcattgatggcgcgcttgtcgtctcccgtcgctctcgctcgccgcgctcccaaatctcgatctccctcccttcctcctatatccacctatctcctcgctcgctcgatctccgcactcgcactccctctgtcagatcgagcagctatacccaatgcaatccatccacccatccatataaagcaggggcgcagcgcagggagcagagcagggggggatgcagtagtatatggtggtgatagtactagtaccgcctcctgtgccccagggttgcccttctcggccttgttttttttttttcattgcatgtgtggttacctttccgaatccatgtgttgcccttgtttcttgctcgaccttggggacgcagatagatatgcagggccaactgcgccaaggctagctgaggttatgtgtggctggctggtacgcggttttgaattgttacactgtttggatgggtcatgcatgggttgggtggtggctatgccggggctgatttttttattaaaaaaagaaaaagaaaagaagagtgggttgggtggatggacgctcgacacatgtcccttagaggcgcgcgcccagtataatagtggttgctgatgaatgaactgtaactgcatatgaaattatcgtgttgattagtagatctagttgaacattgagtcaccagtaagtcctgtttatttacatgtgaggttctacataggcggggtgcataaacagtttagactcacatgtcagtcatgtgagacatgattagctgtagttccatgtaagtttgtcgcacttatttttagcttggctatggttttcaaaaaaccataaagccgtttgtccgctgacaagtagagatgcgtgtgaggggactctatcagcatctgggtcctacgtgtcaatgaccagtggcatgataatctggctaaaatgaggtcagcacagtccagctgccgagttcaggagggaaagaggatgagaccaatacgtgctggacctgtcggttgttctctgtgccatattggtgctgtcacatgttgagcagattgggtgcattgagtagtagaggctgtagtagtaatcgcccagccactaaacacatgtgctcttgtcctgtttagacgatgctctctccgatcagacttaacgtacatatatacgtgacacacaggcttcgcaatttagcatgacactgttgtcctttgattagcatctctctctctctctctctctctcactcactgagagacaacaggggtcatcaagaataggacttgacagttgacagtaatgtgctaatgtctctctctgggggagagagaaggggagacagagagagatcactgtaggctcacaaggagggaaacaaatggttatggtggacacaaagcaaacgaggccattcgaacaagttcaaatacccaactgttactgtgctggtctagttgtctactgcctggcttttccacgcaccagcgcccacttcaagagcaccaacgtaaacaaggagatcgagaacgaataataattttgaaaaaaaaaacaaaggttcgtgcataaatcaatcatctagtatacgcattttcatgattaagtaggggcagcgacattttctagtgctttcatgcaccattcctagatcctgcttagctcatcatctccctgcaggtactctcgctgttcttcttgaaatcagcgcgtacatagatatataaataaatatatataaatacagcatgtatttcagtaaccgtacgtatgtgctgcatgctgatgagttgaagagcaagctaggtagcttttgaagcgagagctctcattttgacctcgcttttgtcagggctgtgcgcatttttcttttcaaaagatagcagcagctggtgcgtgcgtgtatgtcgaggtgacaccaaaattacagggagaattcatagggatcatgagtagtgtaaagtactactataacaactaacttatcgcatcgcgcgcctttttctccatcacttagcttggagaaccttggacatgcatggtctcttcactggagaaggaattgaatcttcagagcggccatggctatagccatagctagctatcgagcttgtataacagggggctctcttcatctcgtctctctctttatctctttatgggccggatgcatgcagtcttcgacctcaaaacagcagctttatgcgatcagattttgtgcatagtgtagtgtgtgcgatgcatagtagggggtgtttggaaactagggactaaatttagtccctctcacaaaaatataagtctctatgataggaacttatatttttgtaagagggactaaagtttagtccctccaaccaaacaccacctaaagtggggctaaactttagtccctctcacaaaaacataaatttagtccctagttcccaaacatcccctatcccttcaaccaaacaccaccttagtggctttttcgcagtgcatgctataattcttttgctccccgtctccctgtagtcctttttcagaaaggtttttgtgtctcactgaactttcatcctcgcctgtcgcgcttgctgcccctctcgatctcctttctgctcctcgagatcgactccgccatgatttacgtttgatggaccgatgatggtctttcattgcacaactcaacccatcatttcggctgaccacaatttgtttcaaccagcgactgcctgccacattgcaatgaattttccacccacatctactcctatgcctgaataaatgaatgctagcaagaacacactagatattcagagaccgaatacttcagaaaagttacaaatggcgccaaacaggaaggaatcaagctaggaattgaatcatctatacggattattttagttgtactattgggagactgtaattcttgtcctgtatatgctagatactggcctcatgcatgcatatgctaacattcctaggcaggtttgtcttcctctaggtcattataatgtgattagaacactctaatgattttttaaaacagatgtcagtggtccttgctgcttcggtgtttagtgcaatagatactataaagaggactaagtaaattatctgaagagtatcaattagggcctctgactctattgaagagatgcgtacgtttgctaacgcatgccctccccaacacccgtcagagaataattaatattgctcccctgcaggacataaacacgttttttaaaaaaattctttattaacacgtagtacgtaattcaacaaattaggtgttagtcagactatagctaaaactagtacgtagtccattttgtcgttggcatacatatatatatatgactcctctcgagtctcgatctctttcacgagaatcgactatcgtgctacttccacgaccgaaatcaagataaagttgtcgttgaaccgtatggttttattaatttatctcttctaaaatcagcgtacttttggcatataattttttctcatatccactcaaataactaacaaaaaaattaaactggtttaataatctgggggaagtggattggtttctttgaattgcatgcaaagattatgtgacttaagttaaaggtgatccctttccatgaaaatgaatcattagcccagatcatcaatgtccttaatccacttttaaaaaagaaaaacaagcatcctatctaatacacagctggaacaattagtggagctaacctttttgctgacaacccatcatacaattaatcggttagttctactctgcaaattggccttctaaatgatgaataccccccaaagcctattaaacttgggggcgtagtactgtacccctgaccatttaatacgtacatatcgtttaattagaacagaccggtgcaatcctgtcctttaaaatcttcagttcaaaatacataaattgagaaaacgcatatatccatgtttttaatggttatggcatatcattggaagaatagcttaacttcaaatggttgcttaaaattatacttgacgccatgttttttaatagatgacgtcattgactttttcttacatgtttgaccattcgtcttattcaaaaattttatgcaaatgtataagatataaatcacacttaaagtgctatgagtgataaaacaactcataacaaaataaattataattacgtaaatttttttgaataagacgaatggtcaaacatgtgagaaaaagtcaacggttttatctattaaaaacggagagagtatatgacgccacacttaatttgacttgattttttccacttctttccctttataggaatatttgacgctacctcccttttatatgcaagattttttatttatagatatgaagtgcaacttcgagagtgtccactaactagagatacacacaaccataattgtagacctcccaagccttgtgccttcttaattactcactacagcataatcatttttttatatctcataatacaaacaaagcatgcatacacgctagcacgcaattaacgagcacatgcatctccctcttttaatttgtttttaaaaatcatctaccctcaagaactcaattaatattggatgaacgcatgcattaattgattatatttattgaagtgatccaaatgataatatgttaataattatttattgttcttcgcattagtggtggttgtgtcttatatttttggaacggagaaagtataaataagtgtgagtgtaattgttaaaaaatgatttgtttttttttggtaaaaatatgatgcctattcccatttccaaaagacccaccctgcatctccaagacaagaagaggaaaagagaaaatataaaggcattattatatacgcgaattttgttcgaaggactacccgctggatgcctgaattactgaacgacacacctgcaaattataaagacaaacttaaggcgcggtactgttcttagcttagctaacatgcgacgtgattaaatgcgtttatgcacggatatatgaagatagcagctactagctgcagtcgccagacactgatcagacacacgagagcgcattaagacgggaattaaggtccacgctcgctgatcggcatgctagctcgatcgatcgtacctactcgcggcgagagggaggaaagtaatcaatcaaaaacaggagcggccggcggcatgattgcccgctccctctcgatccctttgcggattgatcgagttcggaacacgatgagaggagcaggggctagctatatgggccgcaaaagcgaaagatgtagagtacgggtgtttttctgccgcgcccgcccgggcgatcgatcgatcgggcgtgcactctctttgtcgtaatcaatcaatcaactcctacctagagcagatctagctagagatgatatgacacatatatatactcgctctgctaattaacctagggcccgtgcgtgtctgttacgtacgcgtgggctcaagcatgcagtttcaccccgtatgcatgttagtatgttaacaactcttaaaaaaaaatatggttgtagctagtctagttcgtgtactccgtgccgcctgcaggcatatatatattactagggtaaagggctggaaaaatcgcagcagatagctatatacaagtcggcgtaattgggaggagctagatattgagctacgcgcacgcatctgtgcatagttggatatatagacgatccaacgttggtaacatacctgctgtgtcttctaatgcaactatacagcacctctgaattaagaacgctaaccatgctccatgcatggaccggctactccgacatgcatttactacatatatgctgatatgccgtcaatcacatggatcgaggaatcgaccgtgaagagacgtcgcggtttatcgatcgagagatcgatcgatccaagtggggagcgcgcggccggccgcagcatgcatgcatgatggattgatcgatggccacagcgacagccgacagcacggctgcatgctgctgccacgagaactatatatcgccgattcaccaccagacgagcagcgctgctccgatccccagctagcgcggccggcccggtacgttggtgatgaccgtgcaccgcgacccagctagcttcctcgcgcccggccgcgcgccattccaccgtaaatttactcgcgcgatctccgcgcgcgcccccactctcggcgcgcgtgtgcaggataggaggagtaggagagatctttagatgaggccggcgaccgaggaaggttggaaagtttcgcggaccaaacacgagcgggccgcgggccagtcgctttcgcctttcgctcgagccaatctctctttcgctggtgtcactgggggaaaccggccgtgcgaccggccggccatctgtcgtcgtcagtggtacatgccagagtagacgtgttgggacagcagagccagatcggatgctatacggggtaacgggtgtacataggcacgattagattagcatccgtcattatctgtttccgtttcctaattgtagtaaagtattccattaagaagtgtaatgtatcaccactaggtttttatagtcttttaatttattaggaacgctgcgttcctaataaaatattccataaagaagtgtgttgtatcgccacaatgttcttatagtttctttttttaaaaaaaaactagggtttttatgcgtgttaagtggccgtgtaaactcatctgaaaggaagaaaatttacgattttgctacatatttgtcgacaaattttcctccaaaaatttgacagatgtaattacagtacaatcgtagtgtaattacactgtaacatacatgtaattacactgtaactatagtgtaacttgtatgtaacttttaaaaatctctctgtaacatgttattttggtaaagtggaggtcatgagaacaatttctttcacatatgtgtgtgctatgatttgttttcttccttaccaaaacaaatattgtaatagatctaacgattcaaaattatgtgaaacttacatatataagttacactgtagttacatgcaagttacaatgtaattacatataagttacagtgtaattacactataattgtactataattatatctgtcaaatttttaggagaaaatttgtcgataaatgtataggtagtcccgaaaatttattagcccatatattgatatgcgcattgggccccacactttgcatctgcatctatttggaccggtccagcccatctcatgcgcttctcggcccatctggtacaccgcagaagaattacagaaccctaggtccacgcgtcgtgcacgtgttcaccggaggtgctcgtcagcaaagcaggcagacaacacaaaagaacaagaaagaggagtgggttggctaaagggtgaagaaaccaaataagaaaaagataaaaaggggaaaaggtcgcccagcggctgaaaccgacctgcattgctcctcgctgctttggattcgcacttcgcagcttgagaccgggagcaggacgagcggcggaatgggttccggatccggatctttcctcaaggtggtggtaaagaacttggatgttcttgcggggtatgctcttctgatctgaaagattttctggtttctctctaacctctagcggagatccctggtagattcctcttgtgttcttggtaggatttgtgttctgcgctgcgattttgtccaaagtaaccgtctctttgggatagctagcggaagaccatgtagggattgctgagaggattgattttgtcatactactggatgaagctacgagaagtatgtaattatgcaatgttgcaggcctgcagcttacgacttagcaatttttaggattttacattacaaggataagagtttttgacttgattatgctgttcgtagtatttccagcatctagtaagagttctcacacgcaatccttttgcctacttccaaaacaaaatgacaataagattcctcacaatgttcaaccataggatgctggtatacagcttttagttagcagtgcctttctattgttgatgtaatagtaattgcctaccatcatgaagatgttgctcattcatttagtttattagcgaattgtaaagaaaaaaattcaacttatacgaaacttacttgatgttttttttggacgaaggactataacttctaacctctgcaccaactaatgtgtgtggacaccaagagtttaatcatggtgggtggagtcatgcactcacgacttcaccaccacaccaatggtgtttcccaacttactggaagtaataacctttaaacaataattagctttctttcttttagctaagggacaatcatcatgctgtaagttgctaaatgcagctgatgcaggttttcaggaagtttcagttctatttgcactaagctgggttttttttttttttggcaggcctatagtttcacttgcttatccactgtaagttactccagcactttcttttgtatgtaataaatacatacttcttgcattctagttctgattggacacctttacagatatgcatctgttcgagcgatagaaacaaaatctgctgtagatgatcagcaatggctcacatactgggtgttgtactcgtttatcactctatttgagctcactttttctccggtacttgaatggtaaaggttcttccacagcttgggggattattttcataatttatttgttcttgattggtgcctttagtctagtgtgttgcattctgaatcttactacttccgtgaaatatttcctgtgattttagaacattcttggcagaacaataaatacaagtaccattttctaccaaatgaatttctttgttcttcactttgtctggtttagtggtagaatttgttattatttgaagactagggagtggtgttcgtaatgcacaaagatatgcttactctagacgaatgtttgcaggcttcctttatggtcttatgctaaattgtttttcaattgctggttggtcttgccctacttcaatggtgctgcacatgtctatgaacactttgtgaggccaatggttgtcaaccagcaaatagttaatatctggtacatcccaagaaaggatgagtcagatagacccgatgatgtgatatcagctgcgcagagatacattgaacaaaatggatcaagagcgtttgaaagtctggttaacaaggtattatctacttatggatccatttaaagttagaattcttctgtgaacagaagtagtcccctttttgtctcctgctagcgacctttctttttgggtgtcatatcagagtgcaacctacttatgtgttttaatctttggcacataacatttcaattcatgcagtttaaggcttcaaacacaaggcgctccattctggaggaggtagaggctgaaagaagagccaaggctgaactagaagcagaagcaagggatgagaatcctttcttcaatcaaaattatcggtactagaagtcaggtgagcgctggttcattttgttcgttgtactacctgtgccttttgcaatactcatggggagccttgatttcactttaatgcagggttcataggatcaaatttatgctcatggggtatgtgttcaaacgatcatggattagtgtaaataggttctaggattcgagtattcttgctactcttgttgatgcagggttcttgccatgaagtaataaatactagtgaactagatttggcttctatcatatgaaaatgctagaatgaacaacagcatctgcagacaactgatttgggaattttgtttggtcctgtctagcaacacatatgaggcgatctgttcacagaattagcaccaattactctattgtaccgctggccccgctcttgccggatggaccgttccaacgtaagaacgacttacgagtatgatagcactctaatcagaaatgtttgtttcaaacactccaaaaggttctcaatcgtggaagccaccaatccgagcaatataatgcataagcagttttgttaatgacatcttatactcttataccggacagaaaaccagggtaaacactcccgattggctactgaatttccagccctgtcaagacatcaattttcccttaattttgaatgaatttcaacagatttcaaacaaaaccgtttgagaatcacattttgagccagctcaggatgttcgaaattcatcgagaatgtgaactctgaacagaagaatccccacaaacgtgcagtcattttcaatgacaacggggaacatacaatctggaatgataggttatattgagcagaacataaatattgagttgctcaggtgttgtacagatctaccctactcaacctataatacatgctcaaaatctttcttgctgagacgaatttgctagtcaatcgaaaattgagctgtaatttgtagattataacgcagagatattaacaagctgcaaccagttgtatctgtatgtaccactaagctccaaatatgactgaaacaaccctaatatgcgatgcggctccaccaagtcaagttttcattctggcttagacgcaagcagcttcaagcctgccccttctatacagtgcatacccttctccatgtagttgcttcgatcaaagttggtcaccgcatttttgccacggatctcaatagcagcaatgtcgtaagcctccgctgcttcttcctcagtttctggtacaaacaagagaaaaatcattagaaaaatagttttccttctcacaaaacaggaagaattagaagcaggcatgtgcatcgtactgaaagttcccaggtaaatgtctcttgttccagcaaccagtcctatgcgtgcctgccacctcccatctttctgccttctataataggggcatggtttagcagagttgagtaaaacttttaaataagaaacaagccttggcaacaaactgaagggaatgaaaaagagatgtcacctagtaactcctctataaatagaagcccctcttgagaagcagctacttcttctgcaggagaaaaaaaaaactgttaacacaatcaaccatctgagtagcacaatgaatagatatatccattacataccttcttaggtatgttacgcattcctctcgagacatgtcccttatgtcctccagttccctttcgtattctgaaacctggaagatattgactcataaggtcactggaaggcaaaagcaaagggaggaaaagaactaagaatttaccgagaaattcagctttgtattttggccccagtatttaagagctgcaacatcatatgacctggcagctttttcctcggtatcataacttcctgcatagtaggaaatgttgagggaaaagaaaagaccctacacatacaaaattaggacagaacagagctgaaataaacaccgcttacctaaataaactgaagcaccgccatgtgggaacatcattgcaagaaacaaagaaatcattagtaaccaactactcagaaataaccaaatgtgtatataagtcatatattttatcatttgcaacagaaaggggaaaaatagaaagtaggaatttagattgcaccacgcgccaataaaatgtatggtttcattaaatgcaattccttttgtagctatgactatttgtattatttctaccaaccgaatcaaaatgtagggccagaagctaggtgtatcagacttattttgtggcctgctcaacagttatttgagtcattccactttgctggttgggtaggtgttggaacaagatccaacagggatcaagcacaggggaagaagggatgtgttttttctctattcattcaccgtcccccccccccccaatgggggacgtattacatccttatatagtcttacattggtatgggaaatgacaggggtggcccttctgggcttaactcaagagtggtgaccgacaggtggcccccactcaggggcagtctggtagacatcggatgggattgcgctcattaagccagcatccctgggggatcccgtgtttcccggggtgcgctactcgaggccaaggcacgataacgaggtacctcgccctccacccagcgtgctgagccactggtgtcaaaggtagttggccgccttcaatgcaccattaaggctcttcgtgatcttgtgccggccattgcctccggggtagacgcagggctccagggtccccctacgggtcacattctccggagcctgacagagcattcggagcccccccaccccggcagggcggcctccgcttctgagcccatcgagggcaagatcagcgggagaagaaggaggcccttcatccccctctgggcgaggtcgaagccgctcccccaacagtaagcaataattgtactgtagctaaggtgtgcagcccgtaactaactggcagtgagttaatcagataaaagctagggaatgtctcaaaatgcaaatgagcaactagtacagatagcaaagttgtaaaatgctgaacaaaaaattaattcatgtcccacatatcaccaaaagtccataaacagaaaaacaatgcctttggagaatctatttcatattcacgaaaatgtgtcccaagaattacagtccaaatgtgtcccttgtgctctaattcttagtcatcctgattcgtttgttacaatgatactgattgctgaccacattagccaataacggttgcaaagtgacaaagcataaatagaatatagagaaagtgatggtcgaaatattacgcaagttaattataatcccttcataatctaaaattttcacaattatttatatttataggttaatcatatgtgttctggcaatgccatcaaataatttaatataacagatattgtaaataaattagatgcaaaaagtagtactacctttgtcccataagaatggcatctttggctctgtacctggagaggcccagagctagagatgcactcacttattatgggaaggaggtagtactaaccattcagccaataaaccatctactgctgcaccgacagttttaaaatagatggaataccttgccttccctttcttctccgcccttccattctgcacgaactgtcccacagatgagcttcatattttccactccatctatgcctgcagaatcagtgctactttggtgagtgcctccctctaagcttagaacaggaatgatttggctggttaagacagtaaagggacagacagaatgcatcgttttgcctcacttgatcaactattaatgacaagaacacaaccaacaacctcacctggtcacaccatggaaactagatgaccgggtgcctgcaggtcgcacagccgtagttccagcagtaccactagttccacccttctcatctctataacctacgactgttacaggattaactgaatctctaacatcatcagcaggctcatccttcttgacaacactaagaatagtaactctctgatcctcagggataccatcagcagactgtccattctctgccacatttgcctttgcattcttatcattgatagggttcttgctgcttgaagggaccactgaatcgttctttccttcggcacaggtctgaacatcaacttcatcaactacctcacgtttcgggatcttcttgtgaccagtaccaagagactcaactcccttcgtggtgttcgaatccttagctcctgactccactgcagagtgcaagccatcctcatccggggcggtcgccgcacacgccgcagttgctggcaacgaattcagattgataggggagctcctctccgccttctcatcatcccctgattcgcccgcagccttctcctctttcaaagagctctccatttcctgcccaatattaaccctaagccaccaatcaatcgctctacccacgaaatgtctacaggataagagaagcaaaaaaatcattacgaagagaatcatccagctagatctaaacaaattatcacgaaaaccacataatcactatatcgagcagcaggaaacctagagcatgcaagaatcaaacaagtatagtaatcaggaaacacttacccgtggccggaagggatcgatggggacgaaagatccggacgcctcctccgaagacccaaaagaagaagaagaaaaaaatcctacagcgtcgattaccacaaccgcgagaggcaacagaaatggggaggaatcaactaccgaggcaggacataaataggggcgacgtcaaattgattgtggaaacgacgagacgacgacgaacgcgagcggcgagcaaggaggcggctcagtggggagtgatgcgggaaacaacaagaaatttctcggggaaaccgagagaggaaagttggggagaaaaatacccagattatacaatctgttcttcttattattattttctatctcccccctcatccttgggcggattttatacgatccgatgcttaagcacggaggacgtaagcaggtaggtaattaatccgcgcttataaatccggattaaggtttatcactcgtgtaatccgcttcgtgctcgacgccgccctcgtgatgcgtgccaggctgggagaggggaggggatggatgagacgcgcggcccgtgcggcgcggccacgtggacagccgtgatgtgctgctctccgtgggacgggcggatccgcgccgtttggcgttggtggggggggggggggtgaactggaacgttctaggcgagcagcccagggagccaatctcgaggcgggcacccccgccgctctggacggctgcgagtggcggacgcatcgaggggggtcagggcacgctgcacgtctgggaataagttcactttgggtccctctatttgtctcctagtccgattttcatcccttgaccacaaaaccgggtataacccatccctcaacttatgaaatccgggcaaacgaggtccctcggcggttttgaaggtggttttggctgacgtgacgcctacgtggcttgtttgactaggtcttcgccccacgtggcattaacgtggcgcttacgtgccaattatatcccggaaaataataaaaagcgtggccccacatgtcagctgcacacaaaaaataattttaaaatggtggggcccatgtgggccccacatgtcagcctcactcctctcatcctccctctcccctctctctcttcttccctttcccccctctctctctccttctgggtggcggagcaggcgagctccagcggctgcggcgggcgtggtcggcgccgccccccgaccaaagcgcgccgttggcgcgcgggtgactgaagaagcgcgtgcgccgagcggtcggagtcggcgagcgccgcgacgtcagaatcggccggcggcgggaggatgttggagagcgcgaggatgtgggacctcgccgtctcccaccaggacgaggtagggtcagatgcggacgccgccgacgagttcgagggggcgaggctgcctcggtggcgagttgggggcgccggcggagaagactagagatgggggcggcggcatccttcgcttgcgccctggggccccgcgcgccgccgacgccctcctcgccgctgccgacgctagcgccctgtagccccgcacgccgccgccaccctactcccgcgccggcgccgccagtcacggccgcttgcgtccttgcgtcctcggaggcgaaggtctgcgcgggcgcgtccacgtgcctccccccaccgcccccgccgcccacggccgtgctgcccatcgtcttcgtcgacggcgaccagaccgtcgaccttgcaaccgtcaccgtcccgcctcctcctcctcccgctttccggcttcactcgccgccggtggggcgcatctctacgatgggtgccgattcccgcgccgcgccttctccttctcctcctccgcctactcgatccagttgcctccgtcctccatcaccgccgccgccgacgcccccatcctctgtgcggcgggggccagcgcgggtcagggggaccgcgcggcgccggcgatgtcctctcatcgtcgtcccctccggcatcgtcctcccccttggcatcgtcctccgctctcggctccgcggtggcgccgtcgccaccgccagactggttccagcggatcgcggaacggtcgcctccactctctcgccctgctgatcgaggtgtcggcgaggatcagccgccgcctgacccacttcgcccctcggatccgccccccgtcgcccgctccagctgccgctccgccccgccgtcgtccgctccggccgccgcccatgccgcccaagcttggagagcgagagaagagggagggagaggatagagagggatagagaaaagggaggatggcgtgtgggtccttatgggcccaccattttttattatttgtgtgtgactgacatgtgggacccacgttttttttttatctagttgccacataagccacgtcaataacacgttggacaaaaaccaaatcaaaaggagccacgtaggtgccacctcagtaaaaaccggacacaatactaccgaggaacctaatttaaacggtttcgtaagttggggaatccgtcgtacccggttttgcgaccgagggacgaaaatcggattgggctacaaatagacggacccaaagtgaacttattccgcacgtctgcgccgcggcagcagtagcagccgtttgttgggctttactcctcggttgagtccaaagtttctgcgatgttgatgggcctatctgtggtgaacatgtggagttgggcttagtgcgagcgagctacacacctccgcggatttcttgtttaagtacaccaaagctccctcaacttgtcatcgaattacaaaatcatcccccaaccgtaaaaccagatatataacatcccttaacttacaaatttttacatccttcggtggttttgacccggttttatcctacgtggctggtgagtcagcgtgggaccatgtggaccccacatataaggacgccacgtcatcacctccatctttcctctcctctcccttcctcctctctctctctcactcatctccctctgggcaagccggccggcggtggggaggaggtcaccaggacgaggaggtcggacggccagccggcgatgcggcagcggcgacacgggagaagaggagggaaggcggcggcaggagcacgaggtgctaaagcagcctccattaaaatcgagcagacgaagccgaggcggatttcgcaagagctagcgcaagcgtcggccatggaggaggtcgtcgtcggcaaggagcgcaagcgcccgcgctgcgcgctcgtcggcgtcggcggccacgacagcgacgtggcggatgagcccggtggcgtgcgggcgagaaggacaagcacagcaaggtggtgacgtcgcgggggctccgtgaccgccgcatcagactgtcggtgccaacgtccatcgcgttctacgacatccaggaccgcctcggcgtcaaccgaccaagcaagtccatcgagtggctcatctgcgccgctctcgtcgctcgactcctccttcgtcctccccaacgccgcccagctcctcacccgcggaggccgtcgagcgggcagccttcggaggaacaggcgcgcacgaggaaggctacggtggcggtgtcacctgggaagtcgggggagaagaggcggaagacgaggtcggggtgtgcagcgcggaaggcggagcgcatcgcgaagttgagagtgtggagggaggggtggatgccgaggcgcgaggcgagcacctcggcgacgtcgggcggccagagctggatcaggaagccgtcgacgccagggagcggcgactcgtgctcgtgctccgatgcgaagccggggaagcggcggtgggcggagaaggccggggaggtggtggcgcgggaagccgatggcgcggagcggggtggtggcggacgacgacgatgacgatgatggcagcccgcgcgcgcagctcctcccccgctgctgctaacgccgcccagttcctcccccgccgccgggccgcgccggcgccgctcagctcctccgtgccggccatccgccgcgccggccgtacccagccttctcgtcgcctgttgaaagaggagaaggggaagtagaggctaacatgtggggtccacgtgggtcccacgaagtcagctgccacgttggtcaaaaccagagtcaaaaccaccgagggacctagtttgcactggttttgtaagttaagggttgcgttgtatccaattttgcggttgggggacgagtttataattcgataacaagttgggggaccttcggtgtactttttccttcttgtttttaattgattgttgggtcaaggccatataaaacagtgtgaccttgggccgttgaaaggctataccccttaggccctgtttgttttagcttatgattattataatctagattattaagccagattactataagctggattataataagctgacataaaataagctgtgagttgtttgtttgtctggattattgggtttgaaaggataaagtctataatgccctcagctatctgttcggttgatagtataggtgggtaatttttcttaagtatgtaggggtagtgggtctttagccactcaataatctgaaaaaagctcctctagagcagcttattagattataataatctggcttatagattataaaaatctgctataataatctacttatttgtttcagcttactcttaataagctagattataataatcctaagctgaatcaaacagggccttacctgcgctcgcaaacaaagcatcgttcacaggagagaataccgttgcaaaggtgtttatcctgccttgggaatatccataattcaaaatttatcagtacaaatgtacaatcatagtgtaattgtaccttatagtttggatgtaactataacataatttatatgttatgttccaaaacttgcaacaataaacttgttgccatcaagcagacattcgtgggattgaattctctcactcatgcgcgcactttgcaattacatgcaataacattatatccatattgtatttaaaatattcgataaatttttaggctatagaaaatttatggagagatgtatagaaaaattattaggctatatcctatggcgggagagcgaaggagatgtccagcaagtggaagaaacccaatcagattgcttcaaaatcccctccaccaataaaacgtggatcttccgtacgtagtatcatgtaggatcggagtaggagactaggagcatacatgtatctgagcaccgactacgagccgagacaagcgaagtttgcagaggaaactggaagtcaaaaaacggatcgtgctcctgccacctgcccatccccggctgctcctgcccaaaccggccaccgatagaaatcccagagccacagctcgtcaggagagatcacgtactattctacccatacgtgcgtccaaaacgatccctgtatccttcgccgcggtcaacgatttcctcggtccataatactattccccgctgccgcaatgccgcatgccaggacctgatctcccccgaaaaccagtcgccgggtcagggcgcgaatcggccggcagcatcaggcagcaggacatggaagtttcagtccgttcgttacctgcccgcatctgcatctgcatgctgcctcggcgccctgtttctctcttcgctggactgactgacaaccgaacgtggcttccacgaccccggccctctcgatcgcgtacgcgtgtgtggtgtgggcgacgactgtggccgtagtagtatctttttttaggacgagcacggtctcgtctgatcgcctcacaggtatcgctcttccggtacgcctagaaactactcagaaagtaagggttcccatgctatccaggaaaaaaaaaacatatcataggttcacatttatcgtacacatgagaaaacaacatgccaagactatgcaggggcgtgacaagccaagataaacgtacctaggagtagttcgtatatatatgtaccctcaagctaaaataaaagctactactactgctccgtataactactcacattttatcataggttccagaatcgtacgcgtactaccagtgtacagggagtacgtacgcaccttttgcacgcatgaacctgggggtccttttcagttttcacccctagtacgagtagctagctactctagctcgatgctccaccggccctacgatctcctgaacctgagctgcacgaacgaagagtaactgcctgccgtgcggcgtgcgctaggggaccttttaattgatttttcacggccggccactcgcgacaatttccccgatatcccgagtcggaccctcgcagcggtagccttttcccgagtctgtcgcagtagcccgtaggggcaagccagtcactacacgcatggcgctaattaacgcgcgccgcttgtcgtcgtcgtggtggacgatccgctttaaccgctgcgcgctgcatccgcggtgtatagcggttacgttgctgtgggaggaggagtatagtatagtatctctcgatcaaccgatcgttcgccggcgggtcccggcggtggtttgtggttggacgcaggggctgccggccgttaggcgagtctccggctgcgtgccgcgcggcgggcggagtggggccggcgaaagcggccgctccttctcccccactttacccgctgctcccacgacactgagcacgcagtgggcagcagccggggccgcgcaaccggcggacgctagctagctagctagcgagttacatcgatctatcgcctatcgccagcggccacgagccgcactgccgcggcacatgccactgtcctgcacatgtcaacagtgcgagccacacaccacacgaatagtcgccgcagcagtagtagtacgcgcacagtacttgcattgctgggacgcagctacaccacatgcacatacgtacgtagtacgtgctatatattaccaagtacttatacgtaccatttcttcgtcgatcgtgcgtgcatgcatgtataccggtatggatcgatcgatcgatctatacgtgcaaacagtgcaagatatatatatcgagtgatcggcgtacgtgatcgttggctgattagagatcgatggcacgtacgaactgctggtgtggaggagtcaaagcacgggcaatcatttttagttggaaagctgacaggatagctggcgccgagactttaacagaactgcaagtgtcaggaatattgtttaccagcgcaaagctgcaaatttcgtttcgatgcgatcgatcgatcgatttcatggctcaagtaactgtagctctcgtactactagtgtacgtacgttacttatctgactgtctggggttcatgcagagctgaaccgattttcgaccaacgtactgtatgtgttgtgcacttgtgctcgcacacatgcgatcaatattttcccaacgcagtgtactgaatattttctcccagatgaaatctttacaggaacactggcctatgagcgttcaccgatgaaacataggctggtccagccctagctagcaacataaatatgtacccagacagagattttttttactacactagcagtactttttcatgtgaaaagatgcttctggcagttgttagctttgagtggtcagatcttgactatgtgcagttggtcttcacatttttgaccgctcagggcgtacgctaaatactcctatagttttattcacacgagatgttaatgtgatgagctccactttagcttgtgcgtaagaattcagccgcttctgaattatactgtagtagtacttcacagtgagcatccagctagaactccagtttacagtttattagtacaccgttttctagctagtactgatataacatttatcacattagcaatagctctcaactactactagtaacatttacagcaaactcttgaacattagatttttcatatattgccagcgccaagctgtacgtagtactgtgccatccattggcctagatagtcaagtgctcaacgcaatggcctcagatcaaagcaagtcaattgtcatgcctttcttgcttccctgcctgccttctagtcgagatagcgtaagtagatcaatcacacgctgcgcagctggtagcatgcatatgcatgtggggttccttgcagaagcttgcaatggtgtccggcgccctagctatcatcagccagtgttgctggctatctagactttggctgttctggggagataggggagattgattctcgttttccgcatgcacgtttttcaaactactaaacggtgcgttttttataaaaaatttctataggaaagttgatttaaaaaatcatattaacccatttttgaaatttaaaatagttaatactcaattaattatgagttaatggctcacctcgttttgcgtatctcctcaatccccttcttctcaaacacaccctttgtgatgtacagagaagaaacatgaacagtaatgcatgaggttcacacaaagatacatgtatcacagtgatcctcgtccgtagcctgttgacttgttgcatatgcgacggccgtatgcggcaagtactgccactggtcatgaaaacgaattgggatctggtgcagtcacttttaacaactgcacacagcttcaaccattcatttttgtgatcaacagttcagatctaaagctacagtaccatgtgaacagtgtcccgtgctatagtattactactactgtactgtaaacagtatcgtgtatgacctgagccacccgatttgtatctaatgatgagtactgctactgcttaagctgcagtcactattgtgactgcagctgatccaaatccttagattggatacactaaaatcataaatgagattttcacgaaaaacacattttatatgctatagtcttcaatatatttttgagtgcatgttttctcacagtaaaaatgtagtgattgaagctgtaattaattcgaagacaacatgccgatatctaaaatagtgtgtttttttaggagaaagtatatatcttgcaaattagctaaccgctgtgatttcaaatacatgttatttcagacttgtacccaataattaagaaaactgctcaaatgaagagatatcttttattaatccgtgaaaagactctcatatctgtgaaaaaagctgagaagcaaactagaatttatgacttatatccgcaatcggatacatgaacagttactaaagccaaattgattgtcacgctaaatttcggtacttagagcgtatagccaactagctcaaaatcatttatagttaatttatacaatagttatctataaatatatgctacactattaatatatgatcgtacctatcatatacaatgaatatatacattgtgccttagaatcagtactgtagctggctacaaatatgtggttcgctgcttttctctattctatatttatttattttatatgtttataactgacttatagtctattattgtaactgctcttagtaaaatcaatacaggattaattgttactagtactagtacttgtgtaagtagtacacgtacgtagtcctatacaaggcaaggtagccggatgccttttgccctcaggtcactgtagccagggtgactttcacctgccagccggggttgggttggtctcgtctggtgcaccgatcgaacgatcgaccataacatgtgggggcgcgcgtcgcagagagaaaattaaggacgatcgacagcgccaccacggcattaacggccgagcaaaaacaaggcggttgacgccaacctttttcctgatcccctcatctatttctttcagcctgattaaagatcagagacctagctactagacaagtccaagtggaagcgtacgtacacatgctccctgcagcctaagctctcgtcgactgtcgccgtcgaccacgaacttaacgtaacttaccggccggcggcgtcgatcgatacagccgtaacaatatccgctacctagctgcagcattaattcgatcgtgcggtgcctatcatgcaaatatattttagctgcgagagtaaacgcgctcggtttcacgtgcgtacagatagaagaaaatgtagaaccgacgaccgatctagctcatcgatctccctgcgggaactcgcgcgagaatatcttaatcatatgtgagaaaaatatactcctaatatacagtatggtttctcgtagtacgtagccaactgaattgaagttaaagctggagcagtacacccatgatgatattaatttcctctaggtagtagtggtcggtcggttgtctgtagaggacacaactcgatccaaaccacaccagctaaatttacatagattggaagggagagggaaaaaccaaacaagacaagatgtgggggttcagagaggacacatcaagcgatgaaaatatgagctaaagcgaggataagcctctgcttaggcccctagtgctaatgccctacttcgagtggagcttagagagagagatcgagagatcgatacacgcgcgtgtaagcgtggctcgtacatttggggagggacatacgacataaatattttatatatgtagatatatataccctagctaaatgctctctggtggccggagaatggcgccggcaggacgtacgcttgattaattggcgccgcgggcgttgcccggccggcccggcctatctcgtcgtcgacataggccggccggccggccggtgccgcttgctgctgctgcttgccgatcaggagcggaggatgctgcggatgatctccgcgccggggctgttgtgatccatggtggccatgaggtcggacagccggtcgctgaggtcatccacctcccggtgaaggctcttgatgtagttgcacgtctccttcagcagcttcgtcgtcgacgcctgcattaacgccacattactcgtctcgtgcagacaaaacacacaccgaatcgctcacgggcttaaccccaaaccaccacccacacacacgactatagtagtgtgtggattgttctagtagtagccacttctgtgttcaccgaaagcaaacctatagctactaccaaagtggcagcacactagcagtacacaagcagttggcgtatgcaagaatgtggttagctacctggctggagccgcgtcggcgtgagttggggagcagcgactggagcttggagatgagctcgttgatttcctcctccgagatggagccacgcgacgaccttctgctcgacatcgtcaacagctagcctcttctaccaaacacgcactctcttcagcctcaatcaaactagacgtacgccgcgcgtggaggcggagctagcgtatgtggccttgagaaagctagctagcgtgagtgttcttcacactcgaagttagctggctgcgaccgagagagagagagagagagagagagaggagaggaacaagctggccggtttgtgttgaaggttcgctcgatctgcaaaagctagctggatgggagaagtgtgtgtgagggagacagaaagggagagggtgtcttttataaggagatgggctaacatgcgctacgcaaataggctgctagatagcatccgagaggagatcaggccgcagaggattgatgactgattagtacataactattcggcttttcagcatgattatccacgattacgggattactactgtttatgtaggattgcactgcattcatttgtataattaactctaactttattctttactatgagtagaattgtattttgcatacaactctaaattaatgttcaccattataatcagaaaccaccatgatcgatctctcatcactctaattaatctggtaattaatttggtaatttattatacaacctcgtagcaattagccaatgacttattttcgccattaacatagggagtttcatccgccctgagagaaagttgttacggaacagattacagaacgaccgatcgatccgtagagaaaaagggcgatgggcccgcgtgtctctctctgtctaatcaccgggagaagaccctctacattgtggcccaccaccggtaggcagcctgtgggcccagcccagttataataagctatgaccacccaccacttgccacgtgcccatgccgcgccgcaccagcgggtttacccagcaaagagggaaccctagaaagcttgctatatgcacgtaaaatccatggaaaccaaggtttggatattacattattactcctatatacatcagtagtacatgaaaccgtctcgcttttggttggctctgttccgatttgatgtatgcatgccatactttgttcttgcttgctcgtggaactaatcgattactaatatgctaataaatcatgaattgacgtcgaccaaggaccaatctatatatcctgaaactgtgatcggtaagtaatcattagctagttagtgcagatgtttcgattagtccattttgaagtgttccgatcgacgcgtgtaactttgcaaatttgcaattcgtcgggggcgtcaaaattggaagccgagggggacaacgcttgttggcttgcgcgtctttgtacccctagccccgttgcaaaaggacaagagaaacatttgctactattgtattgcaagcatacgtgcagtaccctaactctaacccgtggaagttttgaaaaataataataacaatctaataacctgtgcagaagtctttaagtagaccaaagcttgtttatgcgcgctgctgcataaacaaaccgatcaccacactcaagagagatgcccttgtccccggctgcccgagccgggagagcgtacatgcatgcacacaactcacgctcttttgtctcgtgtccacaatgtcacacggcattgtctgcaaattataactaacaaatcagcagtatagtatgacatatttgtggatcgtatgcgggtgtattataaaagcactatacctaacaggaacagccagggacgatcaacggcaagaagtgagacgataattaaggggggattacgcatgacgcaacacgcgtacgctggcttaaactaaccgagtacttctgattagcggatagatgccggatggtttgagaaatatatagtactacgtgagagatatctgggcattcgatcggggcgtttcgatcgatcgatcgacgtggaggcccagcggcggtgccagatgggatggtgcgggcgggcggacagcgtgcgccaacccccacgtgaccgtcgcgtggcgcatgtgatcgagcctggctccggccggtccggcgggccgcgcgagcgacagccccttgcggcggccagaaaatggccgtcatgtcacgaaatcatcgcgcgccaccgagggccccccctgcacatacgtactactccaactctacacctggggttgtgtggtccgcctcctccttcccgtcctggcgtcctccgtcccccgcccgcgcgcgagcgcgcgcacaccgcggctgcgcacgcgacgcgcccgctggtcgcgcggccgcgggaggtggggagataggtcgtgtgtgatgatgcagctggcggttacggcgggcgggcgagcgagaggcccacgtgaggtgaggaggggtgcatggtggtggatcggtagaggccgggctcgtggcgccggtccgtctcacacgcggcgttggcgcgggattgcgttacacggcacgtaccgttgtcgcccgcgcccggtatatccacggaacatcaacatatgccccttaaatatggatcgatcgatcgatcacccacatatatagcggagtagagaatgtatagctcctccactccgttagattattactactttagaggccccacgtaccggtggtgtctactcgtcgctctctataggctctatgtgtatctttctccgtgatcagtagccactcctacggctactagcatctgtatctatctgtccctctgatatgtgaaatgaccggaccaaccgaagaaacgcccgataggtttagggagctactactagtagtacgggggtaacactaactccgttgcggataaatgcaggaagcgtacaagtacgtgtcgaatttcctggagattggcgtgctacgcttcgtgatacttttgcgcgcaggccctatttttaacaagccacgacccggtcacagtgctaaatatttactccctggcataatataaagaattttaaagggatgtgacacatacttagggtgtgttcggatgccccttttataactcatcttccttgtttttcacgcgcacaaactgctaaatggtgcgttttttgtaaaaagtttctatacgaaagttgcttaaaaaaaatcaaattaatccttttttaaaaaaaaatagctaatgcttaattaatcacgtgttaatggaccgctctgttttccatgtatactgttcaggctgggaactgggagtagcgaacacaccgtaagattataaatctggatataatcttgtgcagatttgtagatctaggatatgttacattcctccaaaatcccttaggcccttcatagtgctcctaggtggagcgttacctcgatgtgccagctaggaatttcgccaacgtgtcgcgtagcaccacgtccttgttgagccgctcgctcccaagcaaggaaacgcgattcctcgctcgcgcgaggcagagggaacgcctggagcccgcgctgtggagggcgtgcctccagctcgccgttccctcatgccctccccagcgtcgacctcgtcgccgtctcctgctccgcgtcgccgaccttgtcgtcgtccccgcgctccgctccgcggcgccgacctcgatgtcgccgggaagctcgtcgccacaccgctggggagctctcgtgccgcttcgatccgtgccgctgccactgtcctcgtcggagaagctcactggctcgatggggaaagcgcggagaaggagaggagctcgaggtcgatgccgcgtccgagctcgccgtcgtcgccttgatccagtgagactagaccggatctggccgctcagcccggcgtcgtcaccgtcgccgctcgggccaccgctccgcccggctttgagagagagaggcgaggaggattggggaagaagtggcgtggcggatttgggggagaagcgcgcggtgaatgggaagaagcggcacaggcggatttgggggagaagcgcgcggtgggttggggagaagaagcggcacggggttggaaggagaagcgccagattttttcgatggtgtagtgggctgtgcggtctaccggtcaaggattactttgttggccacgagcgctatgggaagcgtggcttacgggcccatttcgtcgcttacatgggccagagacacgtacaacgtgtcttgcactgctactgcccttataattcggaacggagagagtaccagagtaccgctatgagtattacatggagcagcacagtacaatatgtcagtatagtatgctgctggatcatatggcaggctactaggctcacggcaaatgcgtgcgtgtgtgaaagagaggggggggggggggatggagcatgccggtatgagagctttctggctcctatccttctgccgttgccaaaaccagccttttggggctacgtaacttacgtgctcgcagcggtccatccatccatcgccgcgaaagctggagtactacgtgggtgggccatgcagatgtggtgtgcaaatgctacaactactactggactactgctcccctggtggtggtagtagtaatagtaactgggagtacagtggtaagcagctgggggcctagccgaagactaaaaaggggagggggggggggggtacggtaaagttaggaaacagtagctgcgtgcccctctgccaagtcatgttcgatccaccgtcctctctgcgcccaaaagcttctgaaaagcttgtcctgcggaaatctctgtcgctttaatttacagcaccactgctgcctccggctggccgatccatccaacggaacgtgatatttaggctgcctgtgcaacagtaattatagcgtactgaggcagtactgttccccgcttttctgagaagggagtaccacaaaagtcgtggtactagatttctgcatgtacgatgaactaaagtcgatcgatgtttacatgcatcctagtccgggccactattaaccttagctatagctcacttttgacggccatcaacacaaaactcgctccatatgtattaacatctattttaccaatactttcttgcatgtctttcagctacaaagtctgacgtatacaaggcgtcatgtttttttttaaaaaaataaactgcaaccgatgtaggaggagaggaagaaagagagggcaagttggcatgtggttaagaagtgaccgagttcggacgtcgccgtcgcggtgtttattgcatggtgcggacccggctgcatgggctgcccccccgcgcggaaggcacccgtgggctcccacacgtgcctgtgcccgacgtgtgaagcaaccaactcctctcttccccagccatgcccatcccttccgcctacaacacgtactgtagtatactcagtactctacgtatacgatcgagtagtatatacgacgtagctgcatgcgattgaggctgttaaataagccataataaaccagtatgttcaaagatagtaattaattaatctatatgtaagaaagtacaactatattaaatcattaaaactttggcgaacttgacagtgatctgattaatttggttctatgaacctgcgcgctgtaaaagaaaacgtacagcgtgtgtgaaaccgaccggtttaatacacggatgacccactgtctcaagctctgggtcttacgtgacttccagcttcgggctcagttctcgccttgtagtacgactagccgaccgtgcatttttcatactgcagatagttaattgcgtgcgtgtcaatctactaatgaaaaaaagtacacacacgttccttgaaatggatcccgaggtagtagcaagtaggagaattgaagccgccgctgctgcgatgcgtgcgtgcatgagctgtcccgaaacatgtatgagtagtgctccctacgtgtggtctcggttgattagtttactgctgcaagtcggcaacgatcgatctgtttgcttttttgccttttctctcgatcgcgtctcgatcctttggacgtgagggactcagcacgtgagtgtgactcaaactcatgtggatttgtttggggagaaattagcagaagcagtggagatgatacatatcaaccagacgtgtttacgtaacagcactgtaatctcgaagaaagtctctttgctgattgcatagcacgtggaagtaggcgcgcgtttgggtgtaccactcctacttctgaacatatgtacgtgtagatgtcacgctcaggatccgtgcgattaatcacgtcaagttgtctgtagtactagcgcagtggcctgtatgtaggctgtccggccggtggatccaacatgaatcatcaaaagtatcctgggtgtaaacgttgacagggtgatggacagcgagacgtctggatctctgaatggtcgttcgaagacaggggctaaagcagatggatgcaggagcagtaggctattagctgcaggaacagcgaaagcgagtgagcgtatctcgatctttgcagagatcgaaggaccagcggaccaacactccaagattcttggtccaaaatccagggtgcacacctaattttcgttaggaactttcatctcctcagtacaaatgtgccctctcgattatgatcgctgggatcgatcgaatgagtgacagttggtcgatccaccgtcgaaaacccaacttgaaatctcaaattctgagataggaggatagcttacgtgatggtgcgtttcttactactagctaggtttgccaccgtgccgctgccggtggagcggcagccagtgcggcgcaaagctccctgatcggcgcacgcagccggcgcaggtgtaccagatgctggcaggcggacagggggggaggggatgatctacctcgagcggtcgcgggggaccaatgcgcgggccggggcgggggaccggtggtggtggtggccgggctgcacggctgggcggacggcatggcgtgtccggttgcccctgcgcgcggggcaggcaggcacctaatagtgccgcgcgcacttgcgcgagccaggggcaggagcaatgcagggcaggcagctcagccgaccaacctctcgaccatatgttcgtctctgcgatggatacgtcccgatcaaaatcaatctcgcatctcgttaatctctttctctcgaggcccaggttaggtgggtgacagcattatccagtggaggtttggggccgggaggcagaggggtgcatgattagggcgagttcgtttgcagcaaaaagtcggtgcttcctcttacgctttaacgtttcggttgggggtgtgcttgcttggcttggccagccatgtacgtgtgagcggcacgagcacaggtcagatttggggccgaggagcgtacgcgactgcatgcttacgccgcgggataggggtgggtggtttgggtttctctcgcttgacaactgcgtaattgcactctggccactggcgactggcgagatgcttaagtcttctgagaaaagcgcaaagccagcaggcaccttccaactacacacacaaaatggaactgtcaggttcaggcggaaaggcatggttcactaaaaagaggcagtctgtcaaaaacaaaatgatttgatcggccttcactgtgttcagttctgatgatattctgagttctgagcgatgtagcacagtacagctttcttgagaaaaagctgctttcttggttaaattcttgcacgaagtggctattttttctttctcagtttaaaaggataggagagtaccccttggaatttcaaatcaaaccgcctcaacgcatttcttgctggtataccctaattgtagcaatcaacgagaaaaaaactagcacagtaataaaatttgtatgaaataaaaccgtacgaagtgatcatggtttttcacaactcatttcgaacttcaaccctgctatctgttattccttagtccttatatatattacgactcatagattctgttttttattatcttctcaacctcagcagccgtcaaacgccttataccatactccctcagccgattgttatctgtacaagctccatctcttagctgcttctcatcaatatccaataacttcaatccctcagacagtcttggaaagaagccttcaggcctcatacaccacgcagaaaaagcagcaaacaatatactcagatcaccatgaagtctttccaccccgccattactaaactttgtgctgccactgaaaattccagaaaagagcagctggtctactccacttgccacagttctccacacagtcacaaaatccaggacatttagaccatcttccagcttagctatccgtccttgcatgtagtctaaacattctacgaatgccctggataatgttaacccttctgatttctcctgccactgccttttatttttcagataatcccttgaccgggcatcaaaatcccttaaaatgacggtagaaatcttttcagtccattgtactctaaaatctttcagttgatttatctccacttggaagatacattcgctacggccatctatattttccatctcaagaaagaatacatcattgcaccattctgtcaatgtggactcaaggtatcgagctgcattaatggactgtgataccttgagaagagcattatcatctgccagagctgttaatccctctgcttcttggcacctttgaagcatccagccaaggaactctgataataaaggtgaagtagaaatcttaatgaattctgctctaagtgctatatttggaatgggccgagcacgatctattagcaaggacaggcccttttggattacaccggtaattgctggagacttatagtcatctgaaccatattcaagcactgttccttgaaaccttgtattccagtttttctcattctccattgataatctcagcttatcatgagtatcctgtctctcaatctctgcccatatttcaagccagtctggccgatcacagaagacggagagaaccgagatcctctgccaattatcatcatccttcaccgaaagtaggagtcctgaacttgagatcaaagcttgggtttgcttgtcgaaagatatcatcaggtcaataagattaagccatgagactctagcttgagattgtttgctgctagcatcagccgagctaatttcctgaagaagttcaatatgcttaggaaatatctctttcaccaagtatgtcgacaatgtgatgaccattccagaaatccactcttctctgcaactataccctacaaggttagctttatccacaaggggctgtaatatctcatccatggaatctacaaagtctctagttatcttataagcaagagcaaaaacaaactcaggcttttcaacccatttggagaaatggcgttgtgcggcagcagctattggatttactaactcttcaattacccataatggttgacgtagttgattgttgacaatgtgcccttctagctgtcgagcttttctacgtttttgcaattcctgcaaactgcatagcgaaagaaagctctcagaatacttgcttttcaggtcacccttcattgaaaataaggggttcacaatctctgatggtttcccagaattaatactagaaaaatttgttccagaaagtgatggaggccagccaagggatgccaaaagagctcgatgatcgacaattgcttgtggtcttagtagagccaaagatcggtcaactctgtgatccactgcagaaacaaggcgagtccattgtggtctggtctttgtgactgaagataaaatatcttctattgttttaagatatccaataggaacatgatatgttttctggagaaaaaacgaaatccaaacttagcagttgacatgttggttttcccatactaaaatggcaatattcgtaccagtgaactttctgcacgagatttaagttttccggtcacagaagatgaaacagcatcttctacgtcgccgacaaaactgtcaagctttagcgccgtttctgtataagacaacctactgttaaaaaaccaccagtgttgaagttaagtatagagcaaatgcttgagcaacataattgaagaaaagtacaatgccaattgccaagacaaggacgagaaaatataaacttaaattatgttaagtatctaaagtcaaggacaatagttggggtatcccacgataattcattcaattagttttcactcaaatttatcgttcccatgctagtccataaaagcctcctccttttttctgaactgagtcatttcacaagtttctcaatttcagaaaccaagaaatcctggctcagctctaacaatgcaattccgggagtagaaaattaaaattccacgttgtttgcttcggttaaattaaagaatgaatcggatgatggtttttatggataatgggtagaactatgtattctaagaaactttgtcaaaaaaaaaatatgcaggtatcaggcaatgatatatcagtgagatgtccgcaggataatataaaaaaaatcaatgcacactaggaaacttagtcaaagagcacagtatcaggactaacaaaataatagatactacccccgttttttaaatagatgacgtcgttgactttttgtcacacgtttgaccattcgttttattcaaaaaatttatgtaattataatttattttgttgagttgttttaacactcaaagtactttaagcatgatttataccttatacatttgcataaaatttttgaataaaataaatggtcaaacatgtgttcaaaagtcaacggtggcatctattaaaaaacggagggagtattaaactaaagatagcaaaccaacttgaggaacaaattatggtgcttcctttttccctacaatactagttaaattgaaacatccatcaagatagaataatcgtgacacctaacatataacagtgatgcaattaagaacaagaactaataccatctgaccagcagatcaaccttatgaaactccttgcatcgcattttcgcacaacactggagaggagaaaacccatatgcttagaataatcaaggtgtttccagagtaaactctgaggtggccagatgtttgctttgttagtaacaaattaaatcacaccctcaattgtttgttggaactttccatgttccatcatatttgcctagctctagcattcaaatctaatcagatcattattttatcctcggtattgttttgtctttattcaaagttttattgaatttacttagtttttacagactaaatctagttaatatgtccaaccaccctaatcccatgctcatattggatgggtgaggtagcagaacaaaatggatgttctggtttcagcactattgttggagtttgattctacattcgcaattgcagttgtagacaaagggcatatatgaaataatatctcaaaaaaaatagtatccccataatttccagttaaattggacaactatccatataataaaaatgaaaaagcacaaataccgatttaaactttgtccaagagtctggctagcaccctgaacaataaatctgggtatttaagcccccagaacttgttaattttatctgtgtaacacccagagttttgcaaggcggtttggctatgtagaatgctagttggaggtatctcctgcatcactttgctgattagaccactgattgagtaagagatgggaaggagatttacggtgagctaaatttacctcctcatatctgatcaatggtccaatcagcaagatgatgtagcaaatacgtccaatcaacatgccatgtggccaaacccgcctgcaaaacagcttaggcctcttttaagtgtgcctcgatcctggcccatccacaggtgtgagccaagatttcaaaattccagccagacatgtggatgcggcagtgatttcagcctatccaaataagggcttaggaggttgagtggaccgtattaacaggttcaggagctaaatatccgattaatagttcagggtgctagaaggactcggtaaaagttcaggggagtatttattcctaatcaaaatgacactccctttctagggttgccaagcccagttgttgattaatcgtgtgagtgccagaacagatatcatcgtcctacccaactgtattggcaatctgtacccaccaagaccaattattaaccagtcaccaaaacctatatcaccaacacccagtctgctccaattttaagcaatccatgccccattgtatcaaatgttagtacagtacatttctaagtaaaggcatcatatcgtatcaatataatggacatgataaaacattggtcggtttcaaattcgtaagcgtcattttctacatgcctaataaaattatccaatctaaatttcttaagcaagcagtagatcgtgcatcagtatttcgcaacacattatggctaaactaaacaaacaaaagtatacgaggaaaagagttgacagcgttaagagttgtcataggagtgatctcattgtcagcttttaatcatccgaaatatcaaatatcaaacaaagcacggatacaaggtccgaggaaactaatttcacactcaccggcgtaatccctgaccaactccactctcgccacctctttggccagagaagaaagttgctcaaacaacatctcctcgctcccaacctccaccgcttctgtgacccctaaaacaacaatgaatcaaaaattcgagcaaaaatcaactcgcgaagaacagtatgtaagaaatcagtaacaagtgtttatctgtgatacctggttcagaggtggaggcattcagggcagcgaggcagccgcggacattactcagagcggtgccggcggcgctgcagctggaggagtaagctgcggcggcggccgctaggcggacggagaggtcggataccgaggcctcgagctccgcgtagcgcccgcggatctcggcctcgacgtcggcggccgcggcgaggtctgcttgcgagcggaagcgggagtcgaggaaacggcggagctccggggtgatgtccgcgggtcgcgggagcaccgccgcttccatggcgggatcgattagggtttggatcggggataatagcagcggagaatctcgagattgggcgagatggcaaggaggaagacgaagacgacttgcaaggcacgagatacgcgatcccttctctcctttttctccttttgtgcgaagagtctccgagtaatctcggccgttgatttaagcgggtaacggttgatgctgccgtcactgcccgtgagcccgtggtgagaccaccgactacgcgagttcttctttcacggttcggtcagccacagttgctcttgctcagtttggtgttggcaattcgtatgggccaccgatcaaaaaaaaattcgtatgggccaccgatcaaaaaaaatcgtatgggccagaacggtatatgggcttctcaggtcgcagcccatctgaaacgtagtttacactcgaggcctatgaattgtttccggcccataaggcccagcgccggcgcgcgcctcccactcttttttcttttttcgtttttctttacccattttttttccgatttttcctttttttctgattattttttttaatctttagcatgttttgagtttgaatgttttaaattttgagttgaaaattttcaaatttgaacttgaaagtttttaaatcttgacttgaaaattttcaaatctcgatttgaaagttttcaaaatttttaaatctggacttgaaagttttcgaatctcgagttgaaagttttcaaatctcaatttgaaagttttcaaaattttcaaatatggacttgaaagttttcgaatctcgagttgaaagttttcaaatctcgatttgaaagttttcaaatttttcaaatctggacttgaaagttttcgaatctcgagttgaaagttttcaaatctcgagttgaaagttttcaaatctcgatttgaaagttttcaaaattttcaaatctagacttgaaagttttcgaatctcgagttgaaagttttcgaatttgagttgaaagttttcaaatctgacttaaaagttttcaaaatttgactttaaaatttaaaatttaaatcaaaaattttcaaatctaacttaaaaatttttcaatctgttagtaaaaaatctctagaatctttcctaattactatcattagtgttaagtatattaactaatagatgtagttaagtatattaactaatagtgttaatagagatagttaatagagtaggagtgctcgctagcagcgagcacgcgctagctaggagtccccggattgtttagcctgctattgaagatttggaggctttgacaattggcatcttggcagagacacagagtagtactcctacacatcaaatcgatggagcaagcaatggaacatgtgcggtgattcactgattccagccattttccgagtgatgtctaggtgatcagtagatcactgccattgcacgttagatttttcacgtcacatgtcataccttgtggctgctcataaacccagcgtcggtgaccgtctccccgacaaatgttcttattagtgaatcatcactatcattctgagtacatgtatccagcagaccatatacaccagcaagatttgcctcacgcgtatgtatggcatgtggccttcagcccagctgtcaattcattatggttggggtaaatgagagaatgcccgccaaggaaaggccgatccaacttgtttcatatttcgattcttttagaaaacttattctataaatagatgtctaaaaaaaacttattctagaaatagtttttttcgtggtgccaactcattgacaccatggtccaatatgacggcgccaaacattggcgccatcaccctagccctccagtgaaagttaagtcactaatgtgatggaccaatttgtttttttattttgaaaaagggcctattaataataaaaaaaggatctagctataataataaatagagtaaattttagaaagctgcaactttagtgacaaaactatcagtttgctgcaacattagcgatatgtttcagtttgctgcaatgatagcgtgagaaattatcacaaaactgtaacttttacgttatatgctgctacattacatataggtgacaactgcagcagcatataacgtagaagttatagttttgtgataatttcccacgctatcattgtagcaaactgaaatatgtcgctaatgttgcagcaaaccgatagttttgttactaaagttgcacttttctgaaatttactctaataaataattacaaatagggtctcggcgccaacgtcattagcaccaaggacctatttgtaattatctctttattacaaatagatctttttctgctacaaatatattcttttaatttttcttacaaagtggtcctcggcgccaacgacattggtaccatccccttgatcaccttagtactataacttagcttccaccagtgggctagggagacggcaccaacgtcattgatgccgtcatgctggaccacgatgctactaacgttggcgacacgaaaagggtcatttctagaataagtttttcaaaaagactaaaaggtgaaaaatctagaagaaatgaatgttctcccttaccgctccctccctccctcccccatatcctcgctctattctcccttcaattcagctcgcacggccctggtgagaacaagattgttaagaaagctcaaggctcatgaagagctcaagctccaaacaagctgaactcgaccttaacccaaaactcgtcagctttgttgaaccaagcttgagctctaaacaagcctgaccatatatgattttcattgttttttaataaactactagtaaattgtacatatccacatgaaaattttgcatgtattcgtatcatacatttatcttaattcttttcatccttccttcattaacgtgattaattggaaattattatttttaggtaagggattatcctttaatatatgtgtacttacaagccaaactcggtagtcgggcttaatcgagcttgagccgagcctgcttgaatgctcgtaggttacacaggctcgacacacgtttcacaagctcgagtctataaagtctgagctcgctcgagcttggctcattgacagctgccacaagcctcgctctagcagcaactgcgtagtgcaaatatgcaatggtcgatgccacgctccggtcaggtgctttggcatcagacattttgaccaaataagttgaacatctaatcaagtgatggattttttaaactaatgtaacaacgtatgattttatgtttttttgctaggatcatgcgtggtgcgccgatttgtagtcgtacgtggccccaagaaaaacatcaatcttggttgtcatggtatcgccgtcaattgtttgatcaagcatcatcgatatcctttgactctgtcattcatgttaggcttgttagtccttagggcgttcgcagtgcgccgtgtgattttggcgaatttgagctgccagctagatgaagaaccccattagccacatactccacaatgcatgttacctatagtgggtctcactagtatttttttttcactttttatctccctttccctctcctttcctcctttctccatagcacagacacggcactggggcagcaatggcattagggcgacgacggcggtgggcggccagatccacccttcctctcctcccccaaagcagcgatggtatcggcagcgcggcgcggctgcgtagcagggggcggcagcgtcgacggcagagagggacggccaaatccacccctcctcgatcgaggccgctcctttcctctcgccacgtcggcttctcccattttcggtggcggcctctctcctccccccttgcgagccgagcggagccggaggctgcgggtcgacaacgagctcctccatgcggccggctgcggatcgacgacgagttcctccgtgtggccggccgcttctcttcacctccgttgccgtccccttctcttctccagcgaggcggtccatgcggcaacggcgccgggcggtaaagtggcggcggagtagcgagcttctccagcgtggagtgtggtgatggtcgactatggcgtggaggtctctctcctccctctcccttctctaacgcgttgctcgagtgtgggccccacctaaaactgaggaagaaccggtggctaattttggcttcgcggtcttgagcaggctgcgcggtttgcgtacgtggctaagaatattccatatttcgctccgaggctgaatgccacctcgtcgtactgtgaacgcccttatgtcaatcctggtttcacgctcttcttccctctttcctatcatccataagacgaaaaccacattctctctgtcccatagaaagttagtatagcaactaatctagccttcacccgttcaccgtgttattcgatcctacagtgcagtacagtagtacatgtcctgtgccaacttcttttaaagctcacgtcaaataggagtagggggatcaaatttggaagcagtcttcacggatcacgaaacaaaagaagtccgaaacaaaatccaagccaccactgacacaggaaaagacagcttatcaggccgcaggtagggcgcgcggtgaaaagagatggggaaacgaatcaatcaacgtataagagcaagtttaatagtatagcccactactaccttcaaatcatctatagccaatgtaatagccaattcatacaatagttgcttactgtactattaatacctggtcccatctgtcacacacattacgtcttagagtccgcgtgctgtagctggctacagatcatttatagccaatgtaatagccaattcatataatagttgcttactatactattaataccgggtcccacctgtcacacacacattacgtcttagagtccgcgtgctgtaactggctacagatctgtagcccgctgctcttctctctcttcctttatctttttaaaatatatttatagttgatttatagcatgctattgtacctgctctaacaactccccagaaaacgagggcaaagagaggcggccacgattgtccgcccttgtcgtacgcgcgatgcaggcgcgtcacatgagctcgcgcgccgcgcgcctagttcgtgctcgtctccgcgtgggcggctgctgggtggagaatctccgcatgaatctgccgaggaggccgcgggcgtccgggcggacggaccacgcacggcagatggaagggggcaaatcgaatgccggcgcgtacgtggggatcccgcggaaaagaggacatcgtcgggaggcgcggccagctgctggccacagcgcaaatgcagacgaaaatggatgaaggaatgaaggatacagggcaacgtgcccacccggtgaaaaactgaaaatgcgtgcgtcacccacggccacaggtgagtagtagtagtagtaaaccgtcccccccgtcccgtgttacccctacacgtgactgcaagtagtagtagtagtacctggtcacgccctgccaccttccatcgcggacgcggaggccaggctcgctcgccgtcctcgtgctctcaagggggaccagagctgccagcaggcgagattgcccacgggcggcgccgtgcctaccgcccagcaagcaccgtgcatgccagtggtactagccatggaccgtaaaaaggtaaaaaaaaccgcagctagctggatggctagatggatatcctcatcatcatgacccccccatatcttcgtatcgtcgtcgatgaaccgcttctccgtcctgtcgtcttcattgcttgctagtagcgcatagtactacgacgtaccgtcctcggcatgcaggtgctacacatctgcgtgtcagcgtgtgttgtgtccgctgataatagacaggtcaagatgcaacaaccgcagcagcgcaccaaataaattgaaggagcaaccaacgtggcaaatgcaccagcagggatcagttgggcagtgagccgcgaggctgggaaccgcgaaagctattgctcgatcactgcagaagaacaagccaggacaaattatcagatccattctgttcctgtgctggcgtaatttactagctactggctggtccctgggcagagtaggtattttaggtctggcagatcatttccctaatcatgtagtaggatggttccttctaatactctatccgctttgttttatcaggaaataaattggaaaatatattatagtctaaaatctatcaatcaaggcctaaaggctaaaactaaaagacaacccgacaagcacccaatcactagtgaaagaacacacagagaatttaaaagggggctcaaaagaaacagggttccggagatatgctgcgaaatgatcaatgcaaactaaccaatcaagctgattgtacgcagcacaactcgacaacaaaacatggatcccccatttttccacgacgtaaagcacgcatcaggcaccgatccactgattagctccacacttgtcaccatctcagaaataaagccgaaggagtgcctgcccaccctagacgataacaacatcacctaggctaagctaagcacagcggccaagtattgagtagggtgatccctccctggtgtactaagacgtaagtgcaacgacttcttcggcaccaagtgttgacttgtccatatatgcaacatatgcaatgtatgagtacacttaaaggatctacaattatatgcctaacatccttttggttccgtgatgaatttggccatcaggcaatcagagaaaggtgcaacagtcagatgactcaacaaagggagcaaaaaggacgcatctaaagtgaacagaggaacattataattcatgttcttcctgtcaagaaacatttgcacaaaagagtaatgggatcgacaggcaccaaatcagaacctcatacaattgtacagatgcaatggtgcctcaattacagtttgtcgactaaatgcatccatcgggaacttgttccgatagagggtagaacaaggtacaaattcccagctgcaaatcgaatgtggaaaatttacctaagggtgaccagtgacgcatgcactgaaacaactactctattgaaccacgtgtaaaatctgaaatgtcaaaaagaaaggcagagattacccatcaggcgaatcggtgctttatgacatttgaggaaaccaatatcacaatctttcatgttcacagtatgttcggcaagagggtggcacaaatcagcaccccatgacagcacagttataaacaaagttaccagaaggcttgctcccgatcatgttccaccgcaacggcccctccctcgggatccatgaatggagctcaatcatcccccctcccatcactcttggtccaccaatcaccaagagccgctctccacatcctcggaatgcaataccccagccattcacagcttctggccgctctggtaactctcccagtgttgtccatgtgttatcctttatgttatatttccttactagctttcctgcatattgtgcagcatataactcattttcaacaacagcaacaaggggaggtgcaccacttgcaccgttgagcccctcagacatgttctctatcaccctccaggtacctttctccaaatcatactcttctccgcaggtcagcacctccgtgttactggccattcccccaattacgtaaaatttgccgttcataaagactccagaacacattcgcctagccttgttcatgcatgggagtgttatccatctcttagtttcagagttgtacagctcagcagagcgtagcacccgaccttgagcatccatgccaccagctacaattgctttctctccaaagctagctgatccaaacaagcatctaggggcattcatatcaacaccaggcgaccacgagtttgtcagaatactgtaactcagaacaatgtgggaaagaatctccttgccaaaaaccaggagttcggtgcccactgcaagtgactccttgtctgagcacatgaaacactcattgtgtggcatctttgggagtgtcatccaccgtgaacggtaagggtcataagcttcccactcctgcacgttgcaggagaaatagacccaatgttctgcaatccccaactgacgccgttccttgtaaagctccccactgcggacaagtgagtggaagttccgattgactgatgcaatggagccataatctgaacgagagcaacgggcgaggcaactgattgagttatctcgaccgatagaacttattagggtacttgaatccgaaaaaccctgatcattgctgccttgacaatccagctgctcacactcatggttcctggcagatttaggtcgtttggtcagtactgctactgcagcaacactatcaggttcaatcctcggagtacttgatatgcgcttactcctcgttatctcaaggaggtggtaggtcatgtatgctaatctggattcttgatcacaggagcttggcaaagaccttgagatcaagcaagattgaccctccaacattctgtgagaattttcagtgatgtctctcagaagagagaacctatacacaagaatccaggccttctgtattcattgtgaacctgcaagagatcataaattaatatcattctactgtgtggaaaaattgatgatcacatttgtatacataactcaatttgcaagatattgtgaagagcttcaccaaggtcagtcgaatgagatctatataattaaaatttacaatccaagaacaagacaaattaaatttcacaaaaactgattaataatgaaggcttggccaaacgattaatgaaacatcatttttgtgaataaatagaacatggcattcattaaatcaaacctaggtcttaacttaacgcatgaaactgataaaccacagaaaatgcccaaagctactccacggtaccacttcagcacagatctttcggaactaaaatgtgaaccactgcaaccaatcatttttaggagttgccattaatcattgaggatagcgattaaagatatagaaattgaagttgaacaaagtggtgctctcattgggtcctaaatggttcgtatacttcttgtacgggttactttatcatcaaaccaaatcaagttccagggcaaatcaacttatctgtgtaattagcttttttttctgtctcgcgatgtatcccttcctagatgaacaagggctggcggttctaactaagcaattataaaataaataaaattaacatgatgcctaacaggtcgcggagaacaaaaatcctatcgtgcagcaacagtatgcctgaggaaaattaatgttgctccatataattctccatggttgaaagttcgacggcaaatctgacgcctaagatgctttagtcccaaaactccacccctccaagtaagctacaattagtgccatcaaaccggtattaaccacggattgctcatccgactgatttgacctaaattctccaagtcgcccattatacaagaacaaaggatgaacaattcaaccgaaacaaaccatgtaaattaggtgagatgagaagcgaggacaaacgtagataagacaatacgccagctacctggcaatcaatctcgcctcaaaaccaaccgtgcccccgccccgcgcgcggcgacaaaatctcgcccaccggccgccgccgacacggcaggcgcccagcgacggcgacgagtgcacggcacccccccgggcggcggggatcgggagagaaacggacgcgcgcggcggagaagccgcttgcgggaggaaccgcgcggaggcggaggctgcggcggcgcggttacgggagcacgcggaggcggaggcggaggcggaggagcggagagggagggtggggagaggtggaagaggaggaggatgcgcggttacgggggcggagagggtgggggtggaggcgtggagtttatgggggcgcgtcggattttgacgcggcggctttgcttgcgtcccgaccctcgttcgtttggccggtcacgcccgtttcagacttttcctccacacccctgcatcgctcaatcaaatcacgcagatgattgagatttaaatgcacctgtcacgaaaacacgagaatgagaaaattaaataaactcgccgtacttgtcatggagcattttaggttcctctatgatttttttttttaaaaaaaacgggggttggggttggagtccccgtcaagggaggacgcggttaaccagcagagcacaagaaatgccagtttactgccgctttcgtccgcttctgcgagctcctccgctaccacgtctgcatcagattgacttcacggtttttaaaaatgcccaatcgtcctaacgatcattgggcgtgcgaaccggttttgttagttagttagctccgcctaatgaaatcactaaccaaaccgccctctcttttgtttagttagctcgcatcgatgtggtggtgccaagtagacatgggctaagcactatgccgttttgcaaattgctgctggtgctgctgagatggtggctagagaacggcactgtggttaagatcaaagcatttcactagatgtagtgggcgtctccctttactttccacccatctcctctccttttctttctctggggcttcgggtgctcgttgattgcacagtccccgggttattttagaggcgaacaaggtcacgttctagagttcgttttctgcacgcacactatgagctgtactttttggacggacatgcatggagtacatgctcctcttctctctctctacctcgcttccctgcctgctttattcttgcttcgttttggttcttttttcccttattagactccagcactttcgttttttcgaaaagaaaaagttgacggcagcagttgggtcaatatcgtttcgatggtggatattatggttatccgtcagttcgacgggcgggcaacggtcgtactcgtacactgtcaagcaatagctcaaagatcaatcgtaccctgctgcgcccttttggaaatgaacacggccgtctttgcacgtgctactgcgatgttttactcaggagatcacaaagacaactctaaactcagtttttttaaggtctaaaaattactgtataattaaagatttaagagatctttatattacctgtcatatggtgggggttcttttagccatacatgcacatcatatttatgcgcatcatgaaaccatgaatgtaccccttattctaagcaccagggtcgtaaacaatggtgcacatcaccatttcagagagaatgctacataatgtttttttctcatgattatgtgaagtataaagaaagaggagagaaatagatatcatacttattaatatatagaaatatactccctccgtttcatattataagacgttttgactttgataaaagtcaaattgtttcgagtttgattaagtttatagacaaatagtaatatttatactaacaaattagtttcatcaaatcactaattgaatatattttcataataaatttttcttggtttgaaaatattactatttttctataaacttggtcaaacttaaagcagtttgactttgactaaagtcaaaacgtattataacctgaaacgggagtagatagtagtcatttaaacaattttttgtgtcctgcaataaatagcttaaccaagcattaaaataaaacggtgcaaaagaagattccaatggtttttaaaggaattgtttgttaggtaagaactaggatgtggatctttagtttggcatataccgactatataaagaagcaattgctgtaaaagaagtgattgcacggtttggtagccaaatagggctgattgtgttgagtgagcatcaaagaggttttagcgtatgaaacaatacacatagagcagcagaggcatgtggcttttacaaagaaatcaaaacagagcagcactgtttatatatgccaagttcatctgtaagtcgcctccctgatgaatgttcacatgccaattactagaggtgggcgttcggtctacccgaaaatttcgatctcggtcttcggtttttcggtcaattcggtttttgaaaagtcaggaccgaatttcatccaaaaaaatcaagaccgataaatccggtctcggttttttcggtctcggtctcgatcagaccgaattcggaggagccgagccagagggcggagacgacgctggcgacgtcgaggcggagggcggagacgacaccggcgatgtggaggaggagggcgaaggtggcggtgcggcccgatggatccggcagtcggcggtccacgcgaccggcgaggcggcgtggaggcggagggcagagacgtcgccggcgatgtggaggcggagggcggaggtggcagcgtggcgcgatggatctggcggccagcggcccgcgcgatcggcgaggcagcgtgaaggcgaacacggcgccgacgatgtggagggcggagggcggaggtggtggcgcggcgtgatgaatccggtggcccggcgcgaccgacgaggcggcgtggaggcggagggcggagtcggcgccgacgatgtggaggcggcggcgcggcgcgacgcgatggaggcagaggaggtgtgctcacacgggatggaagggagggcggcgcgatggggatggggatggaagggagggcggcgcgatggctggatggatggggatgcagcctgtgggttgtctctagggtttagtggtgtactgggcctcctggacctattgggccacaatttgattttctcggttaattcgattaaccgagcccaataaccgaattacccgaacaaatttcggtctttgacatgttgagaccgaattactacccgaatttctcggtctcggtcttttcggttcggttctttggttcggtcttattttgcccacccctaccaattaccataatccattttttcaataggtaataatcgatggttcaattgatatcgcccaatataatttgttaccactgtcccttttttaaattgttccaggagtatgacatttggttattatttgttagattgttccagaagaaaacatcatcttctcttgaaggaattaataaccgtccaatacaaccaactaagacaaaaattaacacatttctgttttgctttatgaggcctagtggtaatgggacccactgcttactccaaaggggaaaattaaataagctaccgtgatcgcgatcgatggaaatgcattgtaatttttgcaaacccgaacgacgaagtaagcgcccatggatccatccgtctcctgattgggacataattaagaagaaaacttggttatgatacaaaacttacaaaaagggaccacttgaaaaaaaaaataacatactgatatctgatccaattctttaggctgtgctttgtacggggtttggaggagatcaaaatttgaatatcaagcacatagattttacttcatatatataaacactgctaatctcaggaacaaattagtaaacacagggaaacatgttgattcaatgataaagtcatgggtacatggctcgacttgatagagttcaatcttgatgactataaatattacatacatatgtgtgtgttttgaatagaaatttaatgagcctagagttttttggaattttcttggaatattatgcataaacgtgtacctttgggtttttaacgggcctaaagaaatttcaaaatatacgcattgtaaatattttcatccgtttctttaagaattagggagggctgatctccgtctatttaaactgtttgttccagaagctgtgagtgtggtatgtaaaagtataattaaagagcgaaaggtgatatttgtatcattgttctcctttgtttgttgtgttgtgttgcatttcttatctttggcttggcaaaatggcaaggtgcgtgccgtggtatccaccttgtttgacgtctcattgtttagtgtctcgttagatgttgaggtggtgatttgtcagcatagacgtgcagctaacagattttacttgttcgatagaataaacctagaagattacagttggtgcgattaaattagaggactcttatctcctttcacgcaaattaaatatagctactagccaacgctcacgccggccggacaagttgaccgtgtcattgaaggaaaacgtaccatatatacaaaagagaggcgaatttgatgtggatttgttttttatttgaccgtgtgatcttcaatgtatgattggaggagaattcgttaggtctacctcacttttttaagttgcgtttgccaattgtcaattttgacttttagatattgattcatagaaaaatacagcataagaaaggtaaacagcgtggattaattgggctgagttttgggtcaaagggaagaaaaattacctcagggtcaaagggtagagtttggcttgtagagactgataggtcaaaaggtatgattctactggcaaatttttgaagttttcttcagattgcaagttgggtgtacctgcttttgaaaagattatggatcttatagcagagcattgatggtttacatgttagtcctccatccatgtagtcgcaaaaaatatatatttgtgaatactccctccgtactttacgaaagtcgttaggacagcgacacggtctccaaagcacaactttgacttcttatttctataaaaatatttattgaaaagtgatatatgtatacttttatgaaagtatttttcaagacaaatctatttatataatttttatattttcaaactcgacaacttgagagttattcatgatttatatttctaagttttgacttaaacattgccctaaacgactttttttataagtacggagggagtactaaattacagaaacttaatggtaagaattaaatttcagaaactaccatgttttatgtccccacggtctcaccaatatcagaactgcttccctcattagaaagagtaatgacttgctgtcatttagtttttttctattgatatatacaaagtcataaacgttgtaccaattacaagatattcatatctttatgttgatactttattttagtcaaagagtaaacaattcgatcacgactcaaagtattcacgaccagatcgaactggacgcagtagctcattacagtagcggattaaaaaagaagtcgttaggctcactagtcaaatatatagtatgtcaaatttgttacaggacactaaaagtatgtggactttaatacgagaccacctaaagaacgtgtattttttcgtggacattgtaaaatatggtaattagctattagacacccctggattattttattatatccggtcaatatggagagaaagagcgttgaaagtaccattttgcccctaggttgttttggcttgtaaagacgactaccactggttccaactagacccagttcactccccacgcacttgatcctctttgctcgaaccctaggttttggggcaacgatgacggtgcgaaggcgacacggggtcttgacgctggcgtgggcttcatggtcggcgccgtcggcggcacgttcaccacttgtttaggggccttctgtgactccccgtgcggctgccactttgccggcgccatccatgacggcgttcccgtgtcgccacctgctgggcccgccttggcgtctatagcgccgccttttctacccactcgtgggcgaccgataggaaggacgacccactcgtctccatcgctgccacgggggccatcgtccgcttgtgccacgagccgctcgccgtgggacatatgccacactgtcgtcgacacacctaaacctagggtttggaggagaggggattgtgaaactgaacgggcaattggcctgcttcgaacgtgtctcggacgggttaaacaacattggcccaagggcaaacttgccttttatttaagtttctctctccatcttgactggatataataaaattatgcgaagggtgttcatcagctaattactacatgtttgcggtgtctcacaacaaatgccataaactcttagtgtcctatagcaaattttgtctatatagtaatcccttcatccaaaaaatagcttcagttttaacctcttagttatctctactattattataaaaattgaagatgttttcgtcaatactttggtacgtcgtctttatttgtgtttgtttttaagttcgttcgtttttggaaatacataaagagtcatataagaaatccttttaaaaacctcgcatgctaacttcggacgaaaggcggactcctaattgctatataattctcgctagaccataaaagcaacgtatagaatacgatcatcatcccaataaggatcatatcataataaggattccgaattagatatcaatactatcaaaataaaaatcccatatatactttttagaaaaaaaattaacaataatacaattaaaatagccttcacccgttgcaacgcacatgcattttttctagttctaaaataagtttttttatatgctcttatctgtcattatcgttagtccgtaaattaataaattttatttttcaataccccttagagcaagtttaatacaataatatatccaactattagcttaaaaattgaaacatcatctgtagccaacctaactcatacaatagttagttgtagatatgtactacattatttatacataatttacacatctcgcttgcatagtttattggaacccgtgctatagttagttataaatttgtaggccgagttttttctctctcctccacataaatataaacgtgatgtgacaacttgtacaacccgcttattgtactcgctcttacccacctcttatataccactcattaatattgttttttttattaatgaggatcacattggtatttctccgtcaccttatttaattttgcaccacgtagttaaagttattttgtgatggatggagtagtgtcagagtgtgttataagaacattttccaatttctaatgtgcattagtagttttttttttgcatgggtattagcactccctctgtttcatattacgagtcatctagagcaggtacaatagcaggctataagccagctataaacatattttaaagagataaaagaagagagagaagagcatcgggctacagatctgtagccagctgcatcacggactccaagacgtaatgtgtgtatgataggtgggaccaggtattaatagtatagtaagcaactattgtatgaattggctattatattggctatagatgatttggagctagtagtgggctatactattaaactttctcttataatgatgcacatctaatcaatatttttaaaaacatactatcaaaatatattttgaatttagtaaaattaatttggtgttatggatattgttaattttatttataaactaagttaaatttaaagttttactttaaaagaaattaaagtgcgttgtaatatgaaacggatgaagcggtggattagctatagcctataagtcattatgacccccgatacttacgtgcgagctaacacgcacaaaagtcaaaagtcaacacagggagtttgcacgtctcagccgttcgatcccttccgcgtgatagaataatcctatcgagcaggaagagattattagctgggcgcatctcaagtaggacaaacagtctcatcaccaccagcgacgtggcagttttggcaccaatgtcgtcgaccgatttttccccgtcctcctcccccgcgcgcgcgcgactccgacgcgtacccacgtccccgcacgtttctaatttgggcacgaacggcggccgtcgcccacatggtgatggatggatggatggcaacgtacgtcgtttccggtcgtcgacgacgtacgtacgcgtgctagctagctcgccccgatcgacaactggtgaatcgctgtactgtacatttgccagtttgccggccgctccggctgtataaatgacgaccggttcagccgcgacgacgacgacgacgggtgtcgccagcgcgacgatcgcggaagatgacaaggacgagccgtctgcgtacgcgcgcctaagtcggccaagcgcgaacggcgcggctcgctctcgcatgagacgtgccatgacggccgacgtaagtgctaacgtgtgtgggtgaccagtctccacaagccccggtaaacgtaccacgcgcgtactactacgtatcatcatatcgtgaaaccaaaccaacgcgcatggccacacaggcttggggggctctctatcccgatacggcaagttaaccgttccgttcaacaaccacgaacggaacagggtggacggagagatgggtacgtacgggtcgcgcgcgcgcaaagatacaaacgcgtccctttctctctcgcgcgcgcaccacggaaaattgagcggcgcgtttacgggagagaacggcgcgccgagactcggttcgcacttggcatgtacgtaccaccggccggtcagcgtcacccatctgctgctcggccgcgtggttgttagcccatgcgcgcgccgccacgcctacgcggttactcccgatcgccaattaaaccacaggtttctcttacgtgatggtcgagctaggtggaattagatggatatatatccggccggccgtacgcatgcgtgcatgcaccgttggatcactgtacgtacagtgtacacacactgtgccacgtttcgattctgtattcctgcgcgtacgtacgtacgctcccacgttggtgtggccattattgattcttcacgatcgaacagtggcaggaaaggtacgtactactttcttcgcggtcgctgtagtatgattgtctgcgcgcgaccgtggaaactgaaaggcgtacgttccgcgatcgcgaaacatagaagatcagggaaaagcggcggcggcgcgcactcgatcggttggttggctgtttaagcaaagtgaatccctcgatcgatcgatcgcttcttcttctgctcgtacagcccccaaatcgttttcatgacagcgagcgacgcccgaacctgcccaataccggccatctccagcaatttttttttctctcttttggccctttcgatctctctctctctccccctcgcgtctcgccgtgattgggtttggacatggacaactactaactcctcttgtccttttgtttgctccaaaggttccctcgccgtctcgcgcacgtacatgcgagatcaccaatgagccatccatgcaacagggccactaacgacgcggctgtatgagagagtgaatcttgttggaatgaaaaaaaaaaagcgagaaaggcgttgggggcagttaacgctccacaaactccagagctgagggtgacagccataatagagacgatccaggtgatggctttacacgtgttagcttattttcccgaaggaaagagcattgaacagctatctaaccagggcccccttttatttgaaaactcagcacctgtaccttgtagatgaattcacgagttttctttatgttaaaaaagaggggcccgtgtttagttaaccaatggcatgtcacggtagatgtgttcattttgtacttgtgtactagtaattaatccccctgttgtttgatcccacgtgagtactttggctgttatatatgtcacttagcaggagtagtagtacagcaactagcagtattctctgtcttccagcgaattgcatgcatggctaaaatgattacagcagacgttttgccatcacgagttcacgacatatgattactcccactcccactcccacaaccatctctctgcgccagcgctatcacgtagccaacgccgctgcatggcaaaagttgattgctccctgtgcctgacaatgagatgggcaaagaggtacgagccggcccattggttggtgttacgttccctcgtcattgatcccttaggcccatagaattgtggaacctagagtgatttccatgggaacatcgcctctgggtttcaagtttccgcactaacaataatttcccctcgcccaagaaattagaacacgcaagtcacctgaaagtctgatagtaatatggccctgtctattttgcacttggtattgacagcattttggaatatattcattttcaaataagttcaattaagattcatatatttcagatggagatagttagtttacagggactgttttatcttaggtgatgcattgtgcaaactgcgaataattagatagaagagtgcgaggacgaacttaatgggctatatggcgtttggaactgaaaacctttttccgctgggctgtcacggaaggaataatggaacttacaggctgtccctggatgatgacatctatgggctatagcttaggctttttgacgtcgtttgtgccgtgataagtctattttgcgtcctgcaactcttgctcctagctgaatcgcatccctcaactacaaaactggatataacgcatccttttatttaaaaatcggtgtaaattgcctccttaggtggtttggaaggtggttttatctgacgtggtagctttgacctagttgactggctaactcaactgtggaccccacctgtcaatgatctactccatcctatcctctcccctctgtctttcctcttcctcctctctcacctcacatcagaatgcagggaggagctcgtcggccatgctgtgcgggggccgtgggtgggggggggaggtgttgccacttttgccagctagttgttctcgtggggaggagctcaccagccgcgacatgcacaagggggagggggtccccagccagtcgagtgcgcggggggaggggtcgacaaccatggcgagtccaggggaggggttgccggttgcagcgcgtgcaagaggaggggtcaccggccgcgccgcgcacgtgggaaggagctcactggcctcatgaaaggtggaaagtcatacatgttttttccatgtttcactgacatgtagggcccactgtaatatggtttttcatatctcacagacatgtgggccctacatgcaaaaaccacttttcaaaccatagaaggagtttatttgcaccggttttagaagataggggatgcgttacaccgggttttgtggtcgagggatgtgcttcaatcaagagcaagagattagggagtagtaataaacttattcctttgtgccgtgtgttgcacacaccgcacaacagctgacctaaataaaaggctttatgggccagccattttagcgtcgaataggcccaaatatcggtcatgggcccaacaaaagcagacccccaagaaacttacagaaaaaccttctcctgttgcctttcaatcattccccaatcaaaaaaagggtaagtttaccatcctttataaagtagaaaatatggtacctctagtactaatactatgtatcttaaggtataaggtataaaaaattttagtataaaatttaggtacctcaagatactttctcaaggattgtaaaattcctcgtcgaaaaaacattatacatgcagcaggagtcatctcctttgtgttcagattttccattgaaaaaaaaatcacgaatattagggatggacctaatatcaaataattaggagtgaggtttcgaacccaggttgtctagcccatcaccttgtggagctagccggaaagcggaaaacccttagacgtttctcgtttaaattttccattgacgagcgattaaatttacgtttttttgcgggtaattaaatttacgttttgccatatgcaggtttcaggtaataccattgtataagctattttgtcttaaaatacggcatggcaatcaatttcctcatggtgattatctataaaatgttatcttttttttgggggggggggggggggcaatcttgttgtgggaatttgtcaatagtaatttccaaacaatattaacacgcatttgtttaagagcaatttcgtcataatgttcacataattgtcaagcaaaattttcaagagtacattgatactcatttttcttccgattatcaatgtataaatgtggacaatcaatactatttctgctacatcacatgaggaattgggctagtggagtagaatcggtagaaccatgatgacgatagaataaggggataaaatgacatgtacattagcatttactggaactttcacagtttcactcgtcgatggcatgcaaaatgcaaattagacaattgccaaggggaattttttgatgtaaaagaggcccttttgctctccaaggagtcattataatgtttacccggggcttggaacgctcaaactatcttgatctcttctgaaaatcctgcgtgacgaacttaaaattcttactggtagttacttgaatgtagcacatgttcctagatcgtcagttgctttggcacatggtacctggtcgatcgtgggccaaaactcaggaaaagaagcacggatggacgggatggtactggtaggagggggcctgtggagaccattggcagatcgggttcatccatccatacgcttttccgggaaaaaacctcgtgacaccaccgaaccaagcatggccgcgacgccaacgccaacccccggtcactgtcgagtcccccgcctagctactcctcccggcacacgctcgcagctcgctcatggaaacgtcgatgtcgacgccgctccatatccggtaaaactctcgagcagatgctcttccgattcagtagcaagccgagttggcgtgcctctgcgtgtgatgatttgatcggtgggtcgcctgctttgcacgctgcaagtcctcctcgtcgggttcacgcatttccctagttcagatggcacatcacagtctcaacagaaccttaattgtctgattgattcctcagggcatggtggaaacagaggacatgcctcatgtacgggtcaagatgcactatgtactatgtgcagtacatgtacgggtacatattgactctcgagcagtacaattcactacacttaatccaataatatctccgtcccaaaataagtgcagccgtggaaatccgtgtccaacgtttgaccatccgtcttatttaaaaaatttatgaatttttttttaaaatagtcacacataaagtactattcatattttatcatctaataacaataaaaatagtaatcataaaatttttttcataaaagacgaacggtcaaatgttgaagatgaatagtgtaaaactgcacttattttgggacggagagagtagcatagattcagagtactactgtaccagggttgctgccatccggactcatactcatggttcagttcggcgcagagcaagtaatggacgaagtcatgcaatacgctgcagaaaaatgcagaattgaaaacgttagaggctgagacgatgttgagaacaaagagtgataaccattcttgttcttcagaacgaagtcgtttcttcaattcttctacacacccagcaccgtagaagaaagcataaataagatcattacagcaaccaatattgttacttcatcagtcctagtatgaaacagtcgtgtaattcccctgtacacgttctacgctaacacaacaccctcaagcatctcacaaaatcacactacagatcccgcaaaaaagctcgagattttcagcaaagcgggcagcgcacgagcccattctcgttgcagtcggggcagcgccggaaggtgtccagctcctcgaggaacaccttgcagctgccggagcactcctcgcacggcacgaaccggacgccgccgcagccggagcacgcgtccagcgcaatgcccttgcccgcggcggccggcggcgccatctcgcagtcgcccagcgccttggacagctccccggactcgtgcatgcggcggacctcctcggcgccacccaggtgcctgccgtccgcgaacacctgcgggaggctgcccggcgcgcccagcgcggcgtggagctcctccttgaacccggcgtgcatcgacaggtcgcgctcgtcgacgagcacgccgtagccttgtaggatggacttcgtcgcccagcagtcctcgtacgtcttgcggatgccgcggaggctggtgaggtacagcaccactttccggtcgctatcaggcggcggcggtggaagctgcggctctggctccggaggcggtgacggtgacggtggcggaggcgccatcttggcgagcttcgcgtcgatcctcttctggaacgcgctgacccgctcgcgcacgatgcccggaaacctctgtatctcgcgcttcttgacgcacacctcgtcgccagggcattcgccggcagcgggaacctcgtcgagcgccttccggaaagcggcgatgatgtctggatcgaactccggtgacccgggcgtcgactgcccccgtcgctcctcgccgcggacgtcgccctcctcatccttgtcgtccaggccttccatgagctcccacacatttatcacctccggctcgcgggccggcgtcttggccggcgccgtggtggccagcaccaattgcctctgccgcctcgccatctgctgtggcggcggcgtggtcttcgccgcgccgccgtcgtcgcgccatttcatcatctcctcgtcccggtcccgctcgaggctgagcgaacccagtgtggaggacttgagcgagacggtgtggtgcacggcggccggaccggagcggctccgcgcgtacgccgtcttgccgccccggacgccaccccggaacgcgtgcctggaccccgtgcagcccatccccgatccctccaccaaacaaccaaccaaaaatctcccgcactgccaccaatacaacccgaacgcaccactcaccggcagaggaacgactccttggatcactggaccatcacgccccgacgcggagaggagaggtcgatgtccctgcaaggccggagcaaatgcacgcgcgggaggtgggccaccgcgatgggagctcgacggcgaggtacaaagacagttgggggaggcggcggtgggcgagatctgatggcgaggccggcgaggtagctaggtgcgtgcgtgcgagcagggaaagggaaacgctttaagccgcgggggggagaaagcgagcgaggagcgtttcgggtcacgggcacgcaccggttctcgcgcgtaaatgtgcgtattaactcgcgcgtttctggtcgggggcgtggcctccgtggagcgtggagttcccggacgaacgcctcaaggtggatggaatgattgcccgctcacaattccacgtcatttaggccatgttgatttcagtttaagattattgtaatctagattattaaattaaattactctaaactgaattataataagctgtaagttgtttgtttctctggattattagagatatctaatagtagtgggtctttagccactcaataatccataaaaagctcctctagagaagattactagattatactaatctggcttatagattataataatctagcataataatctatttgtttgtttcaacttactcctaataatccagattataataattctaagctgaatcaaacatggcgttagccaggctggtgacgggattatccatttatccacgtcggttatcgagcgatcaggcctttggattagcgggtgcgcacccctgcgtagaggtttgggtcgtttttatttggagcagagtgtttggagctattccagtgttcgttcattgtcactcgtcagcaggcagcagcgcgctgagctcgtcaattcagtgtgatcagtttggtgcactgtcatgtcagcgcggtgccggaatggtgccggaatggcgtgatttctcaagggccgtcgatgatttaatactcgtgggttgacgtgaatcggcgatgatgttgcacccgaattcaggaaattttcttgggtgttctgccgtactagtatcacgtatagtactactctgtgacgttgagaacttgagatcgcgtagcattaaaacctgctacaaacatgcggcggtcgcgtttcaaccttgaactgcagatcgccgcgttcctgaacttgaattcggcacagcgggagagtgcagcgacgagcgatgcgttgcggcgggggatcacccgtcgccgttgctcctcctgtaccgcagagtaatacacatgtgtctcacttttgtactcttcttcgataagaaaacaccgcgcttgcgccggaaaactgttttaaacactcgggtggatgtccacccgttttttgcatgtcatctaaatagttatgaaaaattttcaaaaaaattaacatgataggttaatatgtaatatatcacttcacaaacatgcaagttcaaattcaacttctataaattataacaaagataacaaatttgactgtgaatatacgtacaacttgtagaagacgaatttgaacttgcatgtttgtgaagtgatatattacatattaacatatcttgtaatttttttttaaattttttttataattatttagttggtatgcaagaaacgggtggacgtccacccgagagaatagaatccatcctccgcttgcgcctgcgcgtcgtttgacgtttggaacgagagcgagccggcgtcagaaagtttgagccggacccggccaaagcttttacacagtctaacaccggcacgtcgttctcgtctactactcgtaacacgctcctcgcttcccacaacatttgaatctttgaacggctctgcacgatcggagccagtctgggttagaccagcgcaagagggatttgaatatttccaagccttttccgggcaaaggagtatttgagtagtatgtttttttagtagtatgatgcgtcggttggtggtgatcggtgactactctgccgacaggcgaggtcaggtggtggacgtgagcgagcaccggtttcctccgttcccttccagatgagaactgagaagaggagagtggtagtcttgcttggcgcgtggttggcatgtcgctcgagcactcacctgcccaggcgtccatccatccatctaccagctcggcttcttcctgctttcctagtagtcggtggtttgtccgattcctgctagccttttgtttttgcgtagtgcactgcacttcccagctacaaaaaggagtattgctgtgcgtgagcgtgactgcgtgttgccaagtcctcctgatgagaccgaggtcgaattttttactccctggtccgaaacagggtggatccggaacggacgcatgacagatatgcctaatctaccgaattggagctgatcgggacaggggatcgggattgttgctagcacagttggaccaccgaaacgggacgggggtaaacactgaagattggggtcctatcccggcaagaaaattgacatttagccactttcaaggatgggctgcgctgtaatgccattccgccaagttactttgctaaaatgccattcccacgctcgcgcaacacgctgcttcgccgttttttcaatttcattggattaacacacaaaatcacgagtgttgtgaccaatgtgcccttggtcattctttaggtcagtgagacaaaggggattgagagtgagagaaaggggatcgagatgcgtcagctcttgctcattgtggcgccctagatcgatctcgtcggcatcgccattccacccgccgccgcaatcacctctcgccctcacccagctgtagctcacggcggcgctgccatcgccattccacccatcgccgccgcctttgccgcagtcccccctctcgctgacgccgaggacagtctccggatgccgtcgtccctgacatgagataggaacaaggtggagtcgatggattgtactgcacggcgacggcggcagagtagagtggcggcggtggagcaaagcggcacaacacggcggcggagtagatcggcagatcggcgacggagtagagcgacagcgtggcggcgctggagagagcgctggattaggacggcgcttgctgcttcatttggcgcaaaacgaccccaggggcaatttggtcagcagacaactcacttacgggcttaaccggtgaaattggaaaaacgacgaagcagcgtgttgcgcgagcgtggggatggcattttagcgaagcaacttggcggaatggcattacagcgaaacccatccttaaaagtggctaaatgtcaattttctctatcccggcagatgctgaactcacactgctgtttagtgcagtggaagtagcatctacaccagtagtacgaagctgtttgtcactgacagttgattaaattacggtttttcctttttgttggttgattgatttccagtattatattaggtagattttgcaaggtctatcgcagctccaactctccaaggaatgaatgaacaatggagctatgtactccctccgttaaaaaaaaagtcaaaccctgaatttccgtgtcaacgtttgactatccgtcttatatgaattttttttataattagtattttcattgttgttagatgataaaacataattaatactttatgcgttacttatctttttaatttttttcatatttttttaaataagacgaacggtcaaatgttgaacacggaaacagggtttatttttttttgggacggagggagtactgctttgcagcagatcattaaacgagcacatgttatcaatgctggaagcctgaatccggcaactcggcccggctagtcgcggggatgtctctcatccatcatggatcaaagctgtcatgttcgcccttagctaatccggacgaattgaatgacacacaccgcctttcagttagctgcttgcctgctgaatcaggaaaagggaaaaggctgatgatgatgaggatgcaaaggtcgacgcctaaagtgaaccgagatcgagtgcaaccggaccgaagctcgtgggcgaccacttgccgctacagctcatcgcttccgttctttccagccatcccggttaatctaaggctcatcagtccatggctgctgctgcactcatggtatcgattccgaggccgtctttgccggctcgtcggatcggtatcaccatctaagctggtgatgcgttcaattatctgaaaaagctagtgatgtgtaatgtgttatactgtacatgtccggagaagctagtgtgccttcctatcactttctgggcctccccgggcacagttcggcgtcgatgtcgccatgtcggtggtgggtcacgtacggtgtcgccgacgacgtggtctgttcgtgccgagaatctcacgcaggaggatgatggtgttgccgtgttggccatggaccaatggacgacgaaacgagacgagacggtgcctgcctgggatggacatagactggagtactggacccatgaaaacactgtttgctatttattgggcttgttattgcattagtagatttacagggccgagaggtcccagtgtgggcccgttaatcttgaaaaggccgagaggacaaaggccgtattgtcgaggaaaaaattgataatttaacaatttttcgttgtccaatctatatactaatataaaaaggaggagttgtcccctccaatgctacaagccaaatcatccggactaatctggaccgtccatccgcgcgcttctcttcctccaccgcacgatttcacagccgaggattccacgcgcgaagacatcgctcctcctccacccgcagccgcggagaccgcgcgcttctcttcctcgctcactcctcccagcgtcctcgcaggagcgactccccgctgccgccgcggccgtcctcctcgctcgctcctcctgctccccgctgccgccgctacgccgcgccatagccggagccgccgcggccgtcctccttcttccccaccgctgcgccccgctcttccccacctccttcttcccagatcgtgcttctcccactcggatcagccgacggagccgactttggccccttctccgccgccggaaccgacatcgacctcagcccgcggccgtccttcttcttccccaccgccgcggctgtcctcctcacgggcttctcctccgtcccgctgccggcgctacgccgcgtcctcgccggagccgccgccgtatcgttcttctcccactcggacccgtacgaatctccgtcctccaccttcgccgctcgcccctctctctctctctcttcgcccgtgactccatcccctccctagccgctgccctcgcggcctcgccatcgccaatccctccatgccttctcgggctcatggtggaggggcgggggctgccttcggtggagggttacagccgatccccatcaacagcgcccgcgagtgaggatcaagccgccgctatcgagccaaatcaggcggacaagctgagctgacggtgtatacgggaggtagagatggacaccagcgacggcggtgcgttcgatccacgcaaaagtgaccttgatagcatgtggcgggagaggatcggcggtggcgcctgagatgtcgacagggaacatgcttgcagatctctcttccgtcaatggctaccacgagggtcttcccatggtgcttgcccacattgccacctacgccgcgcttgctcttcccccaactgtcgacgcccggcaccatagctgccgaggccaagaagatctggaccatctggtcatctttggcgccatgaatccggccacttccgccaacggggctgctgccatcatcgacccgccgtctcacacggttcaatgggcatcatcacacgcctatgcttcatgtccttctttactagcaggttaaaaaatccttatggatttatttgctaatcatctttacctaatacatatctggtataattctttgttgccttggttttattactatatttttaggtcatcaggtggagaagccatccatatgctaaataggtctcaagataggagtgagcagcaagttcggttttcattgggccatactcctcatctgaacaaacaggtttacatagtttacatagttgttttacagcctataataggaaaaagaatattggatagcttgttattgtgaggtgatcttgtttgttgttggatgatattaattgattgattgttttattaggaattctcggcaggtgtgttgatttctattttgcttaattttgtttaattctgcagccatcatggcccagggagtataaagttgaatagagcggttgcgatgacggcagctcagctcaacaatggcactgggcgtgcactgggaggtatgcttaaaggagagtgttgtagcatttgcatttttggcagttaagtttgagcactggatacaaatcattgatcttctagaagtaacattttgattcctgcaaactaatgcggcacctctgtctcaacactgtcatcaggccagtctgctccccagtttggcactccttgtggtaagggaaacgaggagaaagaaatgaccgaccaacaggttgtgaaagacaccaacgacctgcatcacgcaaataaacaggtatttattattttggttagtttggtttgttgtgcagatattaattaaggccaggggtaggggttgaagacttatggatgaatccggtaccgtaaccttcacatttgaccgttcattagtagctaaatggacggctaccatgcatctgatacatcaatctgtaggctaatgacatatcttgagttatagcgatactttctttaaacaattgctatctttttatgtactgaaatttgcataatccttatgatgtgtttttctttaatcatatttatgtaattaatacatgtagaggataagaagagagatgattagcttctgcatttctgagatgtgaatatctaactaggtatccagatcctaagaaaaaatatcttcagagaatagtatcaagcaaatattcagagaaaacagtgggcccattttttttggggtatttcataccattaatcgtagcattcggcagttctgcagttatgtatactttgcacttctattgtgcaaatgttatgttacaatatatatgctgttctgaaggtccatgacgaaattcttgctgcaatcacagaaacagaggagggacctctccatttgaaatgctctaggctacataaaaaactgacctaatcatatgaaaccttaagatagtacatattattattagacaatatgttggtcttttcttgctaaacctgaattgttatattggtgcatagtggaattagtaagattggtgtgactaaggagatatatttgaagtgtatacatttttattaagtcaatagacaatgtttcagcctgcagtgatcgacatattcaggtgtcagtagagaggcacaacatttatttgcttactggattacttctagacaaggtttgcttcttgcttttctatgactgacatgttatagctccgctaaatgaagtattattacaattttagtggagcattatgatattagttatgctgatttaaaatgcggtaatctattgctttagacatgggaacatacatgatgaattgacctcttgttatagttttagtttcatcatgattttttagaaatatatataatatatgaatattcacaatgcaacatcctctgccttttcttctttggatatatcacactgagataaaagggaattattaatatgttagattgtgctatcagtgttgatgtgaaacaaagttatcatcggtattttttatcatggatttctattttctaatatccgtttcctatctaaccaaaggagggaacaacaatcggtgcatgatctctctacctgatttagacaggtaacactatcaaacacaacttgcatgggatttctatttttctgttggtcatgtgggttagtaatgaggcatgagaaaattttttcaaatttgattactataaattattgttactctaacatccctactcatgttagatgatgttctgaaaaagattctagcctgtatagctttatgtgcaatgcctcttgaggatgctgcaggttgtgtattttctgaattatttgttgtaaataaccatacacacatggattcttctttatgtttcttcatgcaccattgaaactttgatgtgctagcagccagggagttgccattttcctttctacattctgatggaggtaaactcaacatatatgtgtatgtgaaaccatgtcattaatatattttggcgtatttctgatataatacttaaaacaagtgcttatcagttttatttcgagggattaactgaatctggaaaagttttatttcgagggattaactgaatctggaaaatggaggacctagattttctaaagggtcatctgataatatatgttattgaacaagtgtgatctttctttatttttgctaatttattgataccttgccattttttaagttctatttcctgtaccaatttcctataatcaatgtagttttttttatttacataagtctctcaaaggtattgtcaagcttctgaccatgctaacattgaggctgccttgtaacagtgtacctctcctcaaatatcagaaacatggttggaagagtccattctaaatggcatgatggccacaaagtttgtttgctccaaggccacaaatagtgtctcaaaatatagtataaatttgtatgatcttctctttaaattctaaacacggtttttgacaactgacaagtatggataaaaaattcgatgcctaaaaatatgcaggagcctcaagtgatatctttagaagggatgagtttattgtaataaacatgaatatatgatgtaggcttagacaatatttctagattgacattttaatttctatataatacatgattcatgagtttgaaatgtatatgtagttatttatattttgtttttgtctcatgtgacattgatttcatgcataggcatattttatgattctccttgggctattacaaagtaccgtgcattcggattacatatttgtggagacgtgcgttgcacgtgcatgattactagttactttaaaattgacacttgtgaggatgacatatgagaccatctgaatgaatgaagatgggccagggtgtcaaaataattgaaacctatttttaaggggtgttaaaaattaccaaatctcattgtcgaggccaccgtcgttttcctctaaccccgttgtcgttgctgcaatgagaagaaaatgctgctcccttcgttacaaactaagttttctttaagctgttcccattttgcctcaaaataagttattcttagtaataactatattgaagtttgcgaaagtaataaataaatgtatttaaagtagataggggcataattgcactaggattcgataaagtgaaggtattttaaactttttttaatggcatgtgtggtatgggtgaaaatgaatttattcaggatgaagggagtagtagtaatccacttaaggggaaggagcaacgtacatcgcggcccgtgggaagctaagtggtagctgtgtcggctaccctagcttctcgaagaggagaatgggtggcggcaagacgagtgtcttatggtggccttgcgaagaagcggaagatacaacgagcaggagaaagcatgtcccgacgagaggggtgggaggttcttatttgtgctccagcttcatcattgtatcaagtggagctcacctggcttgaaagttatttgcgcgggttagtgcctgcaaatctcagagaaagatgagactatagtcacttacatgtgtctcacgttattttttatttttttatgacttggctgtcacgccagccaagctactcttaaattttaaactggttttaatacttcgagaggcgataaaccaggtttttgctgttgaaagatgtgaatcggattaggtcaatttttggagggaattaaaatagacttttatcaaatacagatgatacaggctgaactgctgatacttaccagaagcccatttcaaattcggcccaaaattgtagagacccaacaccagaagctcccaactccccaaggcaagagcggcccggcgtgagaagcggattagccgaggccgagagccgggggaagaaccgaagaagattgccgtggcgtctccgtctccctcctcgccgtcacagcgcagccttgcgccaccgtcttcgtcgcacgccggattccaatctccccatcgcgccatccgctcctcctcctcctcctcaccacatgcccggctccacggcctcctaaccctgcggattccatcccattccccctcccgaggccgcccgagatgtactacgcgatgcggctgcgctgcctcctcacgcggccgccggtctccctcgccatctcggccagcgcaggcggcggcgagggatgcttcgccaggagattcggcgccgccgtggcgccgcggccgtggggcgcggggcggcggctgtgccggttctacggctcctcgaagggcggcgtgggcagcgccgaggcgaggagcgccgcggcggcggaggggagcagcgggcgatgcagcgagcaggagcacgcgaagctcggggagagggaccagcaggagtggctgagcggcgagaggttcctcactgattgcaagcggcgggagtcgccgttcctcaccagacgggagaggttccgcaacgagttcatgcgccgcgtcgtgccgtgggagaaggggaacctcacgtggcagaatttcccttactacgtcaagtatgacgcgcgcaccacctgttcggtactttgtttgagtgagtcacatcagttttctaacgacgagaaattgcgtttttacttaattttggatcgcaagtgagaatgcgaggcggctgctgagggagtgtacggcgtcccacctgcggcacaatggtgtcacatctgagtatggttctcgtttgcaatcctctggggggaggatattgctccagagcttaccaggtattgagcggacatgctgcagatactaagtgttatcaaatgcttgtgttgagacctatttaatgcaggaactgagctttacagggagagattagtaagagctctcgcacacgagttgcaggtgccgctgctggtcctggacagcagcgttctagctccatatgtaagatactgcacctttatacctatcaaatatataagagtggttgcaaacttaatgtaactcctaacttgtaggattatggggatgactattcagaaagtgacgaagaggatgaacatgatgagtcagaggacgaggaatctgatattgaagatgaaggtgatgaagattggacaagcaatggtgaggctaaaaccgatgaaagtgacgatgaggatgctctgaaatctgtggaagaactgaagaagtctgtggatcgcctcagaaaattggttccatgtactcttgaggaatttgccaaggttatattctgttagcctatccaacattccaaccataacgagaaataagtttttgtatttctcttctcacaaaatatttcataattttgtctgtttttctagaaactatgatttttcttattcaatataaaccatgcggcatcaattggtgtccttttccctgcaatatctgcaaacaataggtcattctaagtttccaacgttaaacaatctcatggaagtaatacaataacataagtaaaataccccgtgataaaaacataactttttatactaaaaatgtgtgtttcttccaacaactaaaaaacatttgtgttgtcattctagcatggacctgaatcataaccttatgcgctggttcttttatcctttcttacttgaagaaaattaagctagaataatgcattagtgttttccagtatctgccccgaatgctgagttttctttcacttgtatgtcttgttgatgatgcttcttcatttggttatgattctagagagttgctggcgcagaagaaggcacaacatcagaatcatctgaaagtcctgagtcatcagaggaagataaaaggccttaccaaaggggtatggtatttcattgagtactctattttaaatcaagttaaaattctctcttccaaactaccttatggttcaatggaaaaattggaactagttacttatttcaatgcctattatcaggagatagggtcaagtatgttggatcctcagaagcctttgaagcagatcagaggtgatcattagatgttggctcttttgctctttctatagtttttcatcatgacaacctttgatcttgcatcgagtataagcaattccgcagtgatttggattacctttcttgtttcgtagtttggcaccaaaaccttagctatttatttagttttcctgatttagaaattttaacatctagcaacacagggctccttatttctgaagttttgcaatcatatttaggtgtctctaagtggaaacgctccatgttcctattagaagttacaaagtttatgatgtgcatgcctgcacataattatgtattgcatgctacagggtgtgggtgcccacatgcatctgcttgtaattttcatgtctttacatgtggtgcacacaagaacatggtgggttgatttgtggtttagtcttgtgggtttgggtggattagtataagaaagtgagcagtaagtttacttatgttgagcttgcgcacgcacacaatggtatattatattttgtccactcgtattagtgaaacttgaaaaacaaactttacttctggttgtttgttatttctactacatgttagaaattacgccactatctactctttaccgtagtttgaagttgatgttcttcatgcaaacactgatttgtaccatatgtatcatatacaggatcattttagggaaagtacctactaaagatggctcaagaaatgcctatacctttattagtggcaggtgggtggatatatctttcccatgtgaaacaggataaaaatggttttggtagatctaaaacctcagggaggcattgctctctgtaattttgaatattttggaacttttgcaaatccgatcagttgaaatatattagcaaaagaccctatgctgcagttgcttaggagaactggtttctccatttgtctttttgatcctcttcatttcaagtggtgtttttcatagtttcttaaagcaaccaagctatacactctcttactgttctgtgtaaacttatcattaccatgaatttgtgaaacaagggtaatgtttctaccattgaaaattacaggactttatcaaagggacaacggggagaggtatatgagatcaatggggatcaagtcgcagtcatattcgaccctcttgcagagaagctgcatgatggtgataatgatgcaactagcaaggaggaaaatactgaggcatccatttactgggttgattgtatgcttctatcctttttcatgaacagttttgtgttcaagtatttgatttggaaatttcaggcgccttgacttcatctcgtttccttgtgcttagctcaggacattgttcatgaccatgatactgagtcagaagattggcatatcgcaattgaagcactttgcgaggtgatttatcaaacgatgtattgaattttggtgttacatacccccaacatttctattttgttgttggccaaccccatgtaataatttttacctgccttacatgattatgaatttaggttctgccatctctacagccagcaattgtctactttccagacagttcccagtggctatctagagcagttccaaaatcaaatcgcagagagtttatccaaaaggtagaggagatgtttgacaaacttactggaccagtagtaatgatatgtgggcagaacatattggaagcagaacccaaggacaaggataaggaacctgtaagctctgcaaacttctatgcatttgaatttaaccaataaaacagtttttgttagttcttatttctgttgtggacatgtacagccggcgctgatgttccacaatctctctcgcctgtcttcgctggtaattgcttgggatttagttcaaatcaattcatgtttattttctagaacaattttgctataatcactaatcacaaaacaacttcttcccttgtgctagcaagaccgtaagagtacatcaacaatacaggtctaaacattgtttgtttagttcctgcatccctttgaggatgcagtgcagtattctgataggttttgtcactttgttttcattgacgagcttggtttactatggctgtgcatagatttgtgaagttaacccttcattagtttctgaaaaggggtgcaaatgaaccagcttatttgcacaaaccaaccatcagcttatatgcattgttaaggaatatagactacctttacataaataggttattcctttacgtatttaggtctctagtactcctatgtattgcctccttggggctattatccaatacaagctatattcataatgcttggatctgttggatggagttgctgccagcactagcgaggatgttggattgatggctacaattcggatctttgctctgatgccatgttatggatatagcttgtattgaataataagcccaaggaggcaacatataggagtacaagagacctaaaaatgtaaaggaataacctctattagccacctttatattcttaggcatgacaggctgccaagtcagtaagatgcgcttataaccaccttatctgtagacgattaccgacgtttagtgctccctatagattgaatagagaatgtgggtcattgaatgattgcacatggtttactcctgcctgtggacatgctttttcttgtaacacaatcgcagttttggtacccaaactaaacgactttttagttccttataaatcataatttgttgtataaactatcaagagcatgccataaggtaaggatattgggatgctagttgtttagttgtaggaattatgattaaacctccttttcttttccatttgcactgttgaaaaaactaactcccttttctgacagtatctaactacttaagcaaaggtttccattttgtatttcacaactggcacttatttgaaatgtttatatgcagccatcatcactaaagcgattggtaggggggagaccaaaatactcaagatccagtggcatatcgaagctgttcacaaatagtcttatcgttcctcttcctgaggtttgtaccatttgctaatctagtttacaaagttatgttattcggaatgaacgattaagtaacatatgtgttgatgtcatgatggcgtttataattgaatcactgacttgcaatgcctagtgcatccgtactagtgagctttagcttggagggcctaccgcctgtgactttgtctctgtttacttacaggaagatgagcaacgacgaattttcaataaccagatcgaagaggatagaaaaattattatttcaaggcataaccttgttgaattgcacaaggtttggatgcaatgcttctgcttccagttatctgctgcctatgtcatgtagcattactgcttcctctcatgtaactaacagtaaatcatgattgatgaacacaggtacttcaagagcatgaactatcatgtgttgagcttctgcatgtgaaatctgatggtgttgttttaacaagacaaagtatgtctactcaatattttctgctcagacatgtgctgaattttcatatgatatcagttgttggcttttgttatgtgctggtgcattatagaaatagatagaaggaaagatcttttctttaaaaagttctttgggcttcctgccaactgttttgattagatgctgctttcatgttttgggtgattttttctatgcaattcccaattaagtcataggtttcattactgagtctatacatgtggtggtgctcctacatgtaaaaccagtggaatatggattttgaatcagtgaaagtttgaaaacttattctaggttactggttatagacttctagagttctagtcaggtggctgcatagggagatatcttaattatcctttgaaattaatgggtatgttgcaaataagttggaaggacaaaatacaacagcttacagccacttctaatctgctatggatgctaaattaaaatttattttgttcctcccttaccagctagtgtattgttgtctgcagaagcggaaaaggttgttggatgggctagaagtcattatctttcatcagcagttcttcctaacattaagggtgacagattaatcatcccccgtgagaggtacttcatttcaagatgatagttattgtactagggcactaggccaatttccttttgccaggtatttactctaattgttgcattttgtgaagtctggatgtggccattgaaaggctgaaggaacagggcattaaaactaagagaccctctcaaaatataaaggtatttagcttctatattccgcaagttgaccttttccacatctctattatctgccaccttcatagtttttatctgatagtcctactcctatccgaactcataagttccctaacttcagaatttggctaaagacgagtatgaacgcaatttcatttctgctgttgtccctcctgatgaaattggagtgaaatttgatgatattggggcacttgaggatgttaagaggacgctggatgagcttgttactcttccaatgaggagacctgaacttttctcccatgggaatttgttaagggtacgccttcgttttctgctaaacttattattatgactgttcactagctctgctgtatataccatgtgatcttgaacatccatttaggtcatcattgtcttctagaaagaaattactttattttggtatgagctcagaaagcgaggtgtgatggattgcaggaataatatattgttttcctccttgcatcagttttagactaatactttaaaatggtgttacatttgcataatctttccaaaagttcctttgtatttgagtcaacattgagtaccataatgtgtagtaatcacatggttttagaatggagatgttactcttactcaagtggtcctccgatggccagttgctatatcaggggaaaatgagattgtaaaaaaatgcctggtatttgaattgaccctaaaatatttgttaaagactctttacggaatcattatcagtatttcatggacttcaactagttgattctcttttgaatgttggacctatttctgatctcttaggttaaatatgttaaaatcatactataaatgacatacttatatcctgactgttcagcgctagtgcttatggtatttgccatgcaaggtggagttgatgatgcaagtatagcaatgtctataaacatcgtaagaaatacatgctgcctttcaaggcaaatagataaaactaaactgggatattctgcaattgaaagcatcatcctttcttcctatacatttgcaactcacttagtgcagttattgctacaaagaagtcactgcaagaagccacatcatcacttttctttgacatcctttaacggttcagattagcccatagtctttctaacctgatgagtccttttttggctgttaaattaatcattttctcagttccatatctaacaaatttgcaacagcactgtacgcactaatatcctgcagcaacgcacagggtgtcatctagtttcttactattttcctttggttcttgacaaattgttgcttagaattcagctatcttaatctgactattggatgccctagtaatttgttgtattcatcttattcgggatttaaacatacttgaattgagttagctgaatttttaatgtgacatggaccccttttcagccctgcaaaggtgttttgctctttgggcctcctggaacaggaaaaacactcctggcaaaggcacttgcaacagaagctggagcaaatttcatcagcataactggttctacactcacatcaaaggtaatttgatttgacttgttgctgttgcagtaaagctcttaaggatggcgtacttggtgtgacccagtaaattacaaacatcattcaactagttaaatttccatacttacctattagcttttagacaattttgaacacgactttagtgtgggacaactttttactagtcgccagctaagtcaacattttttttgacttttgccaaaagaacaggaagatggccaaaacaagaaactgacccctcagccatttttggcccatagaataaactttacatgtttgatttggatctgaaacttttctgtgcagatttatgtttcccatgaccaaaagggataaaaggtgaagcaaaacagtttctttttaaagttttacacacatgtagaatagacatatcaaaaatcaaaggataagtgaaacagtctgcatatacaattctagataaaagggcagtctatctacgggaccaacttgtcaacctatttaagatggcgaatttaagctttcaaaagatttgcttcgttttgtaacatcacacgccaaattgagacttctgagttcacatgtgaactgagtgggtcctgctttttcttaaaacattgattatacgaatgtagttgacaggttgaggccttttctcttatgttaaatgtctcctgctgctttgcatgaacaaatgaagctactgatgtgaatcctatcatatgcatgaggtctctgtatgtccctagattataccaaaggatcctcactctttagtcatttttgttagtgggtggttggggcatgggatgatagtggacaagcttgttttgattgaatgtatggtatgcataaatgcaggcagagtaggtggatgcaattttttagaatgctctcctaaaatgctatttgtgatgtttgcgtttcactctgcatcttatattcacggaaccaaataagtaaattttgagattctttagaagattcatcctcctgcactgtcccacatagataaaggtttatttcccaactgagcaccacttcaccgctctgttttctttgaacagtggtttggagatgctgagaagttgacaaaggcccttttctcctttgctagccgattagctcccgttatcatatttgtggatgaggtatgtttacttaaatgaaacaaacaagtgcttatattcccctcctatgtgctttctcctggtatgatataatttagttttgacataacaggttgacagcttattaggtgcaagaggtggtgcatttgagcatgaagcaacaagaaggatgcggaacgaatttatggcagcttgggatggtctaaggtccaaagagagccagcgaatccttattcttggtgcgacaaatcgtccatttgatctagatgatgctgtaatacggcgtttacctagacggtaaatttacattcacactattgcttccaggatagtaatatggtgatctagcaagattttcattggttattgactttcatgatctacaggatatacgtggaccttccagatgcacagaaccgaatgaaaattctcaagattttacttgctaaagaaaacttggaatctgatttcagatttgatgaacttgccaattccactgaaggttattcaggaagtgatttgaaggtatcacatacaccaacgatcataatatcttttttcctgtggaaattggaattgttctggtccttcttttctgccatgtgagcaggcaatctgaatttccttttctgcagaacctatgtatagcttcagcatataggccagttcatgaacttttagaagaagaaaagaaggtaaacaattctataattatggaaattatgtggtctctcattttcactaactttaacatcttctgtagggaggtccgtgtagccaaaatacgggtctaagaccccttagacttgatgatttcattcaagcaaaagccaaggtattgcaaactgcaaacttaagattttttttcttttagcgcagttctctgcaagtagtattttgttcacattgattattatttcccccatttaggtaagcccgtctgtttcgtatgatgcgacgagcatgaacgaattaagaaaatggaacgaacagtatggtgaaggtggcagcaggacgagatcaccttttgggttcggcaactgacatactgtatacacatctgtactagtgattcttcaaccctgttgtatttgtaacaccaataggctgcctagtcacaggaggaggtctcccttttttatttagagctatttataacgttgcaatcattttgtaccatagaaaaatatctaatgaaatggcttcttttttaccttccataccggctggtgttatcattgtacaattatgagaagatcagaaatcaggttagatggactgaaaaggtcaaaaggagccataagtagctccgtctttgcttcagcctgatcaagatgtaaatgctccaggaattatagtttgattgatgtacactatggtggaactcaatcaaatatattttccaatgtatgcttctctgatattagaagcagatggatgtaaatactcgtgtaattgatgtaaattgaatctcggggaccgtagttctggagatgaaaggcagctccctaaaaagacgatgggaactggctagttactagagtggagccagagaccgcttaggttgttaccggttgcaaggctacgaactaaaatttaaaatttaatttgttttttttttcctgttactcagtgactggccaatattaaaaacttcgaagttgaatgttcgtctgctgaaacccgggaaccggttcccacacatgagaggctgctttggtgaacgtgatagctcgtggggtaagtgataaattatcgtttgattctgcttattgcagagatcgtgatcactattgattggagtcccactcccatttttaaggcaaaagatgaaattaagtccgggaaagcgagtgcggaactgtggaagtagttcgaacaagtgaacgttgacaccgcaggctcgcatctctactgatccactcagggcatctacaaccaaagatctactcagggcatttaaaaccaaagatccactcagagcatctataaccaaaatcacacctaaaatcacacctagagtatccccactaactgagagtactctttgagacacttctctcttaatggaggatatcctaaatgagctccttaaaatttcaagcaacttggtggagatactccagcccacaacgagtgtcccagcccacaaagctccatgtatatttttacttcactacccctagtctctttcttctcttttttcgccgccgccgccccctcctcttctcttttcctcacctctcctctccctctccctctcgccgccgctgcttgcctcttcctctccctatcgctgccaccgctcgcccggagggccgcctccctccctctctctatcgccagccgctcgcctctccctctcgccagcaccaccgccgcccgtctccgcgcggtggccaacggagagccgcacgcgggatacgctagttgacagcgagcggcgcgaggggtggggtggccgacggcgggcgagcttcgccgctctgtctccgtcgtcgccgtcctcctccacctcacgccgtcgccagccgggggcggcagatctggtgccatcgtgggcggttctgcccaccccccctccccgcggccagatcgggatggatacggcggtggcgggcgcggcatcgacagaggaggtcgtgacgacggctgtagctgcgcgtgggctcgtcttgctctgctccggcggatggaggcctcgtcagcgggccgaggcgagaggggcaagaaggggaatctgaaagggaggaggcaggggagacgggaccacgagccatgcttagaaaaagggagtggaggcgcccgttcctttaatgggggtcgcgcctcccttcaggggtccggcgacggaaaatggacggcgtttgcgaagacacgggttgaggataccattgctcatgctctcatgagtaaggtctcaggagtcaggactcgggaccactctagcaaagcattcatccttgcgtcgcatcgcatggtaggcatcgcaattcgcaagattgagcacgacgtgatcaatgtgatgcagctggagaattaatcaattaatcaggcagccaatcaaattaatgctctttatgcagatccacagtcatgttccagtcatcttcaggaccagttttctctttcttttcttcgcgtccatggccaatcacttcaaaaaggaaaaatagctgttgcacacgtgtacatacattgtagcacaagttatattgggctccatctgccgaatagagagtacagagtaggatggatctcaaccagccagtactactgctacccccccccccccccccccccaaaaaaaaaggaaaactagaaccaggagaaactcaccaaaagaccgcccatttcctgatcttttattgattgccttgattagcactaacggcactgatgttgccgtatatagtggcgctcaaagcctgattcaattcatactaaccacactttgaaggattccccgacttaaaaaaagtagaatggagatttgataaattaacacttttaaaatgggctttgattatttgatatcatggtctatttttattcacttagatggtcccacatattatcctcacaagtgtaattaaagtaagtagacaacgaaaaaagtattatgataatttatcagtcttatagtagaacgattagaacataaaactatcaaatataggacaccccacgctcctgagaggcaatattgacacccccacaaagcttcctagagtcacgagggggagaaaaaaatgacaactcaaccaaaatcaatgcaccacaagccgatatcagccacatccaatcacacttcattaggggagatccagaagctagtcgccgaccacttcattaggactttacgccaacatactgctaaccaccttaattatcagggtattacgtcgacatagttatagactactacatatattaaggttaccatcctcatactttatacttgtaatattaatctactattataaaagttgaagatatttttactggtattttggtacatcatccgtgtatgaatcagtttttaagttcgttggcttttggaaatacatatccgtatttgattcggtttttacgatcgttcatttttggtaatacagaaggaatcatataagaattctgttttaaaaaaactcatatactaacttgaaatgatcagacttctaactgcaactcatgattatacacacacacgaaaaatatccgtgtattaaaagctattttaatcttattattgttatatattttagttaacgtgaaatctattgtgggaactcgtttggatatatatattttttaaaatcatgagctgcaattaggagtccaatcgtctcaagttagcaggcaagtttttttaaaaagatttcttatgcgattccttctatatttctaaaagcgaacaaacttaaaaactgactcaaacatggatctgtatttcaaaaaatgaacaaacttaaaaaccgactcatgatgacgtaccaaaataccgattaaaatatctttaatttttataatagtagagataagcgaactcccacagtgaatttcatcttaactgaaccatataacaataataagattaaaatagacttcacccgttgcaacgcacgggtattttttctagtaaaggaaaaaatatcagtctttggccaaacatgacatgatcggtagggtcattattcatcacagggtctaaacctaaaaaaggccctatcaactatctctcattacaactttgtttatataagtcatactcctcgtatttacattgtatatacacgcatagtatagtcggaatgaattttatctatcaacaaatagttcgaagaaagactggtgtgaaatgtgactagtcacatcactgcttgctaatataaccaattgattctatcaaatgatggaagggcagcgaataacaaagaaatacaagagggcggtttcaccaaaagttactccccagatccttttgaaagacttgcgctgccgtgtacttacaaatctaactgaaaacacttttgtcgatagtcgatacagtaacactaagatgttacaatttgtccagattgatgttgtgtctttggggcaacttctctgaacaccctctacctgaatgcattgaccggttcgaacgcacgctttagtcaggaatgttcatatcgttcaacatccatccgctgaaagttatatattcagatttcacttcagttgaagagagacaagggggtaggtagagggcgtaaaatatttactactacaattttcttcttcaattctcaattcttatatatataaaagaattgagaattgaagaagaaaattgtagtagtaaatattatatatatatatatatatatatatattcaaaaaaaagttctgctttaattgagctaacattctaacgtatttgacccgttaaaatatgtcaatttctccatgcatctccctctttttttttcttttgagaccgaattagctgttatgtctctctctcatcgttatatgttaatttttggactggaccgggccacgattcgtagtattagcacttgaagtttgtggttggtggcattgcaactttgaaaagagtttttttttttgagaacaactttgaaaagagttggtccatcatctgactcatctaccacaccacctctcaatgagcatgcgtcttgtggttggtggcttaatttcgtgcctgaatactttggactagtctcatattacagtatcacatagaagagagaattccaaggtttctttttcctttcgattacatggaaggtgcacacacttacaccattatatacgtacacatgtacataaacaaacccacaactttattaaatatatattgaaagcatagtcgtttcaggttgtacaacttcaccgctataaacttttaaagcttccctaaattttcccattttctagcaaggaaacaacaatccatctgttctgcaatataattctaactacttagtacacatgttgtacaacgtatggaaataagccatataaaacttaacggagtagcacaataaaatatatcggcaaacattggccttagttctgatttccttacgagcctcatacagtgattgcaattttagtttaaaatttcggaaatttcagaccctccggcaagtcattatctcgcctgaaatttttggattttctcaaaaaaaaattgttgaatttgagcaaagtttattcaaatttagttaaaatttcaaataatttcaataaaaaagtaccaaaattcatgaaattttggtgccaccgaattttcatcgaaatcgaaggttgcaaattctgttcccataagattgaggtacattttttttctagcaccgccttttccattacaattagatgcgctctctcatgctggtcactttttaagataccaactaaacagtcatgaaaaactatagaaaaaataggactgataataatacaatagggatcaatcgatctcacaaaagagtagttcaaacttgatctagagaggggaaaacaaattttagttgtaaatagcgcatgcaccctattcatagcgtggatcgaatttaactttgtgtgctcactgagtattatatttgtgttaattcctaattatgtctataacttttcagattttcttataactagttcacacatagtatgaagtaactgtgttaatctataattctttaaaagatttcaatgctaattggtgaatctaacatcacctatcactgatggcatgtgagacctaaatgcttaggtggactcctcttataaacagatgtacaaatattgttcatttctcatatcattatagctccacagctccactccaaattccgcttctaaagttaaatttagaagttggagttctaccaaatggacccttgaaagcaactatgtagcttgacatacatgtacaaaaacgatgccaattattgtttacaatggaaatgttttattataaattttggggccttagagtgtacgatggggtttcctattttaaattccgttgcaacccatggacattttacctagtatggtaaaagatttctcctgacttggtataagtttggtttatgaacacactcttagggcacgttgtaaactatgttttggcttggctacctttttcattttccactagcatattttttaaactgttcaatggtgtgtttcgtgtgtaaactttctatatagaagttgctttacaaaatcaaataactttattttcaaggttttaataattaatattcaattaatcatatgctaatcacctttattgttttacgtgtggctaattactcgttttaaactacacttttgaacgagcgtttagttttttttggaaaaagtttaggaggtagcaacataaatgtcaactatagtactcaccagcagggttcaccttttttgattgagcactggatccagacccctagtattatacgaattttcgtcaaatttcaatcaaattgtgataaaatttaccttttcaaatttgatttctggagaataattcaaaaattcactcgtaagtctgcttttatccagcgtcaaaacctcaatattttgtgttttttttattggttttgcgtccaaaatggtaacaaatggctagtgttgttaggacagtcccaacccataacactagacatgattttcataaactccacatcatcaagaaattagtaccagacactactcttccaatgcaaacaccactattccatacttcaatttaatattacttatctcacatgatgtcttggatgttgtgtagaaaccatgtctcatgcaagacatggttttcttctctttcctcatttattcatttgccacgtcattttttgttctaggtggcaacttatttaatgctatggacaccattttagtcattggtttgggaatgcccttatagttttggggctgatgtccgctaattatgaaagtacacatgaacgtgcgtttgcattttgcaatggtgtgtgaagtgaatgctctgagctcatgctatgtgtgagccgttcgtgagctcccgaagatagcgttgtactacttgagaggcacacacgatctgatgcacacacacgttgatgcctctgtggtgtaagcatatttgcgtccaaaaatacacttcaccagaacacattgagttctagcaaaatctacaaacacattgctacattgcagggcagccttgcaggacaggtgcaaaagctggaccgtctcccgtcgactcgtcggcgacacgattccgcatccgccgaccgcacgatccctcaaaagatgctcccccggaccaccaaaccccgtcgtcactccgacgtggcagtcctcggtaggtgagtcatctccgtactgaatccacaactgctgctactagatcccaaatgcccccgtgaccaaaatgcccccgatcaactggataaaccatagaaaatatttgatcctcacaaatccgcaaatattgataatcacacgaagtaccaagcatagaaagaatctcgatattttcttcagacatgaacttgacatcatcgcaacttgcaagtagtttgatcgcagcagccagcaggtattatgaaggctgcgttcgttcaaggagatcaaatgatttttttaagcatcatggtcgtggaaaacaaaacgagaaattagcgcacgattaatttattactataaaacttgaaaatgaatttatttgtatttataaagaagtttttttataaaatgtctttttttagaaaatgcaccgtattgttaacgaaaaacacgctgttaactcgtataaatgggaagtgtgctaacaaaaaaacaaaaaagttatagtttgaagttggagattagaatggtgcctaagtcttaggccgaaagattttattatagactctttttttagtttaggcttttatgagttttttttggttttgtggtttataacaaagaggtttttaactatcagctgtaagggtggagttctaactctaattcacacaaaccaatcccaaaatataagaacttagttctggatgaggcacattccagtactacaaatatgaatagtggacatgtatatagtagtaggatgtatcacatccagacttttatatttgtgatggaggtagtagctatttaaacttaacctttggacaataatgtaagagtggattatggttttaaaaacataacaaaaagctattggatctatttttgggggatttgtgtttttttatgtaagtctacttctacacccaatgaagacgccatatcatgagaacgactaggtgtaaaacacctgatatgatgaaaaaaaggtgataaaatgttgcagttgatcatcataaagtaaaaaaatcatttaaaacatttaaaagatatgtgaaatactacaaaatgttcgctaaaacaattagctcttgtatactaattatcgaatattaactgttgaaacatatatatatttaccattggaatataataatatttaatttaaataaatataacaacataatagaatcgtagatcgtttaaaccttactgatagagctgtaataagcgagcacccatacaccatggtgagaaaatggaggacaaatatgcaatagaccaagaaagaagaggcacaacaaaaatatgagaagagtatatgatcgttatgtcttgttcagacaaacaacttaagtatttccactatattatgcacgaggataaatgataatatactcatacttattttcgcgtagaataggataggagtacgttgttttcccttacatatgacaacaacaattattgttacaattattgcatatggtagccaagattaagtcaaaggatgatggacaaatgtgtaatttcctctccaaaattacgcaactactcggcagcgtctagccggtccggcatcgccctccgcactattttacgtccccacatttccaaccattcgccgccgcccccggttctcgcctctctctctctctctcctcttcaattctctctctacctccgctgcggagctcgccgcgtagcaatggaggcgggcgtggggctggcgctgcagtcgcgggcggcggggttcggcggctccgaccgccgccggagcgcgctctacggcggcgaggggcgggcgcggatcgggagcttgagggtcgctgagccggcggtggcgaaggccgctgtgtgggctcgcgggtccaagccggtcgccccgctccgtgccaagaaatcgtccggaggtacagggtcgctgcctttcttcttcgttctgtcagattggttgatttggcaaaagtttgtgtttttgttttggacgaactggcggtctggcgccatttgggccctttttttgtgtgtgtccgattttgtcgatcgggattgttgatatttggaggaacacatggaacgggtgcgttgattcggtcaaaaaaaaaaaaaaagcttgcaagtaaggaattaggtggtaaggctggcttcgaatggatcgaatactgcaaaagttgtgcctctttctgttgtttgcttttgctatggcgtccattttggttcagattttgagtcctattgttcggattagattgatcaaaatggataggttgattgggattattattggaaaggtaggaagagatgaagtttcgcctatgattggtccttctagatcaagccaatcctgaaaattccacgaggtgtgatttatgtcttcacaaatttcagacaaattgacgctcctcgttatattgttcctgtgcaggtcatgaaacattgcataactcggttgatgaagccctcttgctaaaggtactgcataatcaaatcaaaggcgacactggagtttgcttgttttcttccatcactctatgttctaaccatctgttttattttcagagaaaatcagaagaagttctcttctatttgaatggacggtgtatttacctagttggttagttctgaaacttctcattcctccaaattatcagcactgaaaaagatcaatatatagatggcatctgaatttctggttgataaattaaaacatgtctgcaggaatgatgggttctggaaaaagtactgtgggaaagatcatgtctgaagttttgggttattcgttctttgataggtttgtatttttgctatttgccaaggagatcttgcccttggtgctcatggtaatctaagcttttatatttctggaattgtttgcagtgataaattggtcgaacaagctgtgggcatgccttcagtcgctcaaattttcaaggttcatagtgaagccttctttagggataatgaggtaatctttttttctgaatccatcttctgctaacatgatctactatcttagcatttgtttacttgtagttatcagaaggaaaatctgagactgattattttctctgtggctctcttttatgcattacagagtagtgtcttgagggatttgtcctcaatgaagcgattagttgttgctactggaggtggtgctgttatccgaccagttaactggtatctggagttcacttctatttttcctgttggaatagtttattttgtggcttctcttattttgattaacaatattgtgatctctttgttgtattatcaggaaatacatgaagaagggcctatctgtttggttggatgtgcccttggacgctcttgctaggcgtattgctaaagtggggactgcctcccgtcctcttctagatcaaccatctggtgatccatacacaatggtgactacttggcccatgaatttatgccatgcatgaatatgatattatttcagatgtatttttttaaatttttaatcagtcaatataggctcattcattcaatgtagaaatgaaaaactgcaagtatgatcctgcacatctgcacaactggtagtgtaattctttcatttcagtgctagtatgagttgctcactggattcttcctatcttaggctttttctaaactcagcatgctcgcggagcaaaggggcgatgcttatgcaaatgctgatgtgagggtttctcttgaaggtataacttcacaagtttttcgcaaatccgcgctttcccatttagagaatatgtgctaggttatgtgcgacacattacttttaagtaatgcttgataactccatttttccctgcatagaataacatatatgtttttggaacttgcagagattgcatctaaacagggtcatgatgatgtatcgaagctaacaccaactgacattgctattgaggtatgcatgataagctattctgaacccacaatcaggagcaatatgaatcttatttttttctaacgtactgaaacaatttccctaacaacattcttggcattttacagtcgtttcataagatcgagaactttgtcattgaacataccgttgacaatccggttggtgactcccaggctgactcacgtgctcagaggatacagaccttgtagaattttgatcttttttgtaccttagtgttaccttgtagcgctgttgagttatttgttcgttgtaccgacaagatgatgaaaagaaccggaagtgtattttccttgtaaactgtaaagaaaaggaataatggagctaatcagaaaatcagcgtttggttgcaataccttggggattttggccttcgttcttcactgaacagctgaacatcttagttccaaaagatgaagatctccatctgaggtctcagaaaaatacaaaatgccacaggagattctaccggaatcctgaggctgagacgaactgggcactggccttctcaatcgtccactcaccgtcgtcctccatggttttgttttggataacgatgggccaatccgtagttggcgcctaatcattgtcacagatacttcgacgtcgccgtagtaggggcgctggtagggcaggatactccgatgagatcggcacaggagcaacgcgagcatgtgctccaaattggcttgacccaccgggccaccgagcgcgtggagctgagtcagctgactaagcacgccgatctccacacaacgacggagactgttgcgcttcaatccagatcctccgcagtcctgctcactgacatatggcccgaggatctttgaagctcacatgtcagtgagcagtactgaggaccctcactcgttgtgcttggccgcagcggagaggaatacgccaacgccctgctgcttgctcttgcttgggcatcgtgaagccccttgaggcccttcctgctcctgtattgtactcgacgcaatttacacggagactgctacagatcggtgttgcagtgtgttatcaagaaatgtttcacatgtttcatccctcgctaaaaaatgtttcaacaaaaatgttccagatgtttcactaccaacgaaaaatgtttcagtgcttgagaaaaaatgtttcaaacaaatgcaacattcaaatatactgattgcaacactatgctccagatgtttcactaccaacaaaaaatgatacagcgcttgagcaaaaatgtttcaacaatgcaacattcaaacatgctgattgtaacaccaagaaatcaatgtatgcaacattgagtcaaaatgaaaatataacaccttaatacaataaaatgcaataaaaaaatacaaatatgattcaacatcactaaaaatccccaacaaaatccacctctttattcttctattccggccatactagcagtggcgggcatatgcgacggcgacggcaggagagggcaccggcaggtgtgggcgacggcgcgcggtggcctcctccttgctcccccgcgcacggcggccccctccggcggtcgagacgcgggatctagcaggcgacggccaacccccacaccgatccggcggccgaccaccctccctcgcgcgggatctggcgcgcggcggcctccctcccgacggcggcgtacgcagcccctctcctccctctccctccggcgtggtcctcgtcccaccagcacggccttcaccttcatcgacaacaacgaccgagcacctagccgctcgccatgggaagttgttgatggggagagaggagagaatatgcggctaagaatgaggataagactgcatcgatacgttgactagagaggagaaaaggacgagggagaaaaggctcggtgggacccacctaagatgaagagtccaatatttcctcccgcatcgcatggtcgattggaagcattttcgaatttacacggtccaaatttttaattggtaaaattgatgtttcagttctaggttattttttattctatgtctaaaaatctaataagcatgaaggggatgcattattatagatgatcagttagccatgatttttattcatgaaccttctctctcttttttttcttcagattctacctttcatcggattttttgcggtaacaatattcttcttcaactcaacaataccgattatattgaaggtactaaccatgatcctcttgtgcacaaattcataaaattcctgaatgttgtatgtaacttcagatatgtgggctgaatgcttcagatatgtggggcaacaatgctgaagctcaacctctcgcttttgacctcggacatgtgggctgttctaatccttatcttcgcttaccatgaggtctctgaacatcaattcctccctccataacctcatgccaatacttcaatcttaaaattgaaattgatattaatcaaattttgagcatttgcaggttgattggatttgcttcgttgcttttgctggcatggcagctggccttgtcatctactcatacaagccttccttcttcatctgccattgcttctgaacatgcacataagatacatacttcattcataccaaaataaatcaatttctgaccacaaacctacacataaggaattgatttattttgtgacggagggagtagcaaccagctgtgacgatgtcactactcaccactgagaactcttgcaagcaggggctccaaggaggcggagagtcggagacgatgatgaaccagcctccaataaggaggtctcgtcgttggttgctactacctcaaggtagtagtaggtaggattctgtctgctgcatctgcacacaattgtgctgtaactgaaaatgttttactatgtacagtgtgatagctggttcataggggcaaggtttggtgtgaactgtgatgatgtgtgatatttttactgtcagataagcaagatagggttaagaactagcataggtttactgcataatttaaaagtatacgtgtatcatgtctgattttactattgttttgtaatattggtcaaggcttcgtgcctgcctgacaagttgtaatgcaaaagattcagagaaatttctatggacgatctgatgtacagagtatttcaggcagtcggtttcagcactgtgccagggacaaggtaatattacactgcacaattgatacataaccactagagggaaatccagaaatgaggagacaaacaccctgaacagtaatgcacttgtcaacagaccattcctacttcacaatcatatttcattttccataaaaaatatttcctaaaagaaaaaggtcttaaattcagtatgtaacaaggactcaccatgaaaaattgtgttagcaaaatgatcattacgaagtgacatatacctagctataaagcccccaaaacaactcatataagggagcacaaagttgtccccaaactagcctcaagtcatctatcatcgatcttgacattattcagagccaacatcaacacctttctttgataggaattcctttgcctccaagatatcctgcaaattaagtaaatacaactgagaatagactaataatttctttgaagcagaatggaagtgtgaattatctcaatatcagttgggttgtttcctttgaatcatgcaacggcaattgcgaagattttcatgttaccatagtgcaaactgcatactttaaaaatattcatttacatcacataataataccttgaacacccatttctcatatcaacagagaataaaggggggagatagagtaggaagtcgaaaattttcactggtatatactaactaacatcttcaagtcatagaagtcctagtttcaaactaattaagatcatcataggcccatgcacagaaattttaggctcatggatctagaacaactaacctgctgtagtagtacagcttcttgcgggcaagttgggaagaacataagcccaaatccaaccataaaaaggccatagcatccaagtgccactaccaagtagatgggaagctacaataacaaaaagtcataaataaagcccttatccttaatcatcttgcactacaatcatcaaggaaattgagatgaaaattgatagcactgaccaaccaagtataacttcgaggaacagtcgcggtttcaagaagggcaatccaaatagctgagactgccaccagcatagcaattatcttgaatatgtgcttcatttgggaaaccaagtgttttctgccaagataaaccaaatgagaacggcaaataaaatgtgcccgaatgttacagtctcaaaagatgaattgcaagcataattgcactagcaattcagtatgctagcactaaggcagacccatggcgagtaggaagtccagcagacttagcacaagcatgaaggggcggatccaacttgggacacggggattcagttgaacccctaaactttttggggaacaaacaaactgttacttgtattaaggttaaggctctgaaattaagagaagatattcttccagatctagaagagaagctagggttaacggacgcaagcaaattccagacaaaagtactcccggtgggagagagagataaatcggaaagaggatgtggatgctcaccaggatcccctcccctcccgcgccctgctctgctcgccaatggagatcggcgcccctcccctgttcagccgcgagatggcgcaaggagcggaggcggcgacgacgagacgggagattttgttttacgccaagggaagggggagataacggagtgctccaccttttatctcaaaattttcactttaaaattctttacgataactggtaaaccacttgccagcagtactcacgacgataaacttcttggatccctggcaactaactgtcgctctatacaccagcaccacaccatcgttactccactctgccttcgtatgcgcagccatacactttaaatctcgacatgtattttctcttccctcattgttatacatgttattgtcatggtcgtcgttaaggatgggattgttgggcttacagggctcggggaggcaggagccaacccaacagaaagcgaagatgctagatttggactcctccttactatatccgacgattccccaattgtcgaaggaaaaaagaaaaatgagagagagagttagtgtgcagagtgattgcagagtcactgatttggaggtggagcgatggtggagtcaccggacttggagtttgatggatagaatgaggtggtccaaattgtaacaaaaatgtaaagttcgtttttgtgtagataaaaagaatgtttaaaggatgatatcacatcaaaacttttaaggatacatgtacaaattgtaatttatttatttttctctagcacaattaaatatgagttatctattagcaatagtctcgtgctatggcaagcccactataatttgtctccacggtatgattggagatatattgaaatattatgtgaattatgtgggatgatgattaaacatgcttgtattaaaattaataaattataaaattatagataatatagcatgcttacatgatgtttaagatgtaataattgttagtggatgatgatgttatgcttttgttagtaaccctctgttaagtgctataaatagactattttaccgatatgaattgttgaaagatgaataaaaatttttactcttttaatcaacgtaaataatttagcgtaaagagcaaactacaaattagtgtaaactaatggaaagagtaaaagttttagtgaacttttaataatttgtaggggtaaaatgattttattacaacactttacataggaatgctaacgaaaactcaataatgatggcatttctaaggcaaaaacgcttgtacttagaaagttaagtttatcgatgacatttattagattttctctaaaataattagattgtgcttctcaagcgcatgaaatgcttagcagacgcaatggatttggaggtggttccggttggaaaccggatcctctgagggacgtccgaccatgctgattcgttcgatcggcatcggacgggagcgatggaacacaggaacgaacaagctaagctgtcgcggcccacgtaagaaaaatcggcccacgaagaggcttgactgccgtccgcccgtctccactctcgacacagccggagcgccgctggaaggggaagagaaggcaagcgctgccagtcgagctccggtgtgaggaggtcgcaggagtcccgggttgaagtggccttggctttgtccggatcttccctgcgctccccggcagagctcgcgcgcacggccgcatgtggtgaccaaggcgaaggttccgaaagcttgtgttctcgacgctgctggccctcggattatattggggcgctggagatgcaggtgtgctccatggcaaagctcacgaaggcgctccctccgtggcactcccgccgccggcgccgtcggcggcggcaatgttgtcatctccagttccaagcaaggaaaggactcgtatatgtatctgtgcatctcttttttagggtattactgtgttaatgagcaaatcgatggtgaaaagcatccataaccagttaacaatgctagtgttcctttttaattagtttagtcatgaatgatttttgtttaacggcaagctcgtggcttctgcagcaaaagcaagaacgagagtattcacacgcttcttttagacgtatgttcccgaatgaaatcgaccgggctgatttttgccggcggtaggcgccgctctagcatgtccgttaaccgatcctttcgcgcaatctggtctggcatgtggcgtaccaactaccaagtcagtagccagtagacaggtcacgaagtactgaagtactccctccatcccacgaaaaaccaacctacgtcccacgaaaaaccaacctagtactataatgtaacacattctaatactacgaattagacatatatctgtttagatttattgtactagatatgtcacttttttttcggactgagggagtagaaagaaaggcacacataaatagcccgccagcttgcgcttagttatagtgctcgctccaaccactttatggaatagataaaaatagaatttcaaaaagattagatctatacacttaaatcatctgttactaccaacgagaatatacaccctaagctcttcccgtgcaaaaaatcacacaagggcatggtgacaataccataagcttaacaaatgaacaaaagaattatcacatgaacatgaaacaattctcttagggcgtgaattcactctactcgaaagtcgcagcatcatttactgtccaagcttgctccatatgcctttccgtgctgttaggcacttcaatttgccaaacacaaaaccagacttttgagggttcccgtctacaagagagttctcgtatatttccttgcactcttgtacaacctaagaacgaggaatgaacagtgaacacgtaattatcaattaaaaaattctgactaacagtttttctaatcactttcaaaaggcataatttgaccactggaataggtctaatttgcactgtttcgcacaaaattgaaccgcacatgcatatgatgtgaaaaatgttatgttcttacctctttggcttccttccttggaatgccttccctcattcccacaagcttctcaacaacctcaggctacataacgtagatatcaagttcagcacatcaacagaaatgaatgcactactaaaccactaatttctggcaaaatcgagtagcttgttgaaaaaattaccgggcaatctggttgatgttccagaatatttgtataaatgagagtaaaactatccagactctcagctgaagcaagctcccttagatcagccagaatccgcactctggtttcaactttctggagcacaaaatcatagagtggttaaagttacagaaccaacaaataagcatttgtgaagaaaagtctaggattacagatgttcgatgctaaaattgtaaaatccagtttaattatacaatagcacaaaatacatggtatcgtgggtagcttggactttgaatgaaagccacatgaatggaagttgcaagtatacttactgtcacattaatgtgttctctgaaaaaatccataagcacttcttcatcaagcctcatcctttcgattgtttcttcttttatatggcctttctggaggtgcaaagggaatacatattatcaatttgaaataaattaccagccagcagctgcataagataagtagacatgtagtgtgaaatgatgggtgtaattggtaaaaagattgtctgacccagcaacagctcagtacagaatgatttatgaaacattttccaattcatatttttgttaacagtcatttttgtacagagaaccacaactggccaagtatacaactattcagtactaagggcagttctgcaaacctgagtaaggagatgatcaacgtataccacaattgtttgctccaggcaagcctccacaaatcttcgaaatgatctttcttcaatatatctagaaaaaatagacccggaagtcttcaaatcaagtatagaaagaaacatgactaactattatcaggaataagtgaccgtttacatgccacaaggaacacaaatgatctacaaaaggttaagaatagaacttatataacaaagaaaaaaaagtaaaaagtgtacgtaaaaattgcattggagctacctatgtttatatactttttgagaattctcacttgcatttggaaaattatcaatttacacattttcactatttggcaaacaatgtatgaaaatggttcatgcttgagatttggggttgagatttttcacgtcgtggcacacaatttgataggatgagattttctcaaaatgtgtagagtatcatatattcataatgaagacataggcaaataaaataaacataagtcagcatttcttagggaatgtatccttccgttccataccacttatattcaattatatgagaacttactgtttgacatccccaaaataatcagcaaatgttgcgacaagatattctgtaaccattccttccatccaatctgaataaataaaaagaatcaatgttagaaaagagagagagagagagactcacgaaaaaaaacacttgtgcacactacccattaaggttaaacactcaggaacacactgtaaacaagaaaagactagtacataaaatatataaacagtgttgtatatgatccttggtacatcaaaatctaatatatcagtttcaccaaatcacacatcggtgatggctatacttggtcctaagcacaaatttaattgtgtaagcatacatgttagaaaattctgggtgcctttctgggcttgtcgataagactctcacaagggaacaggagtcgctggtgctttcaattccaaatctaatcaagaacatgacacaaacaacagaagaaatgacagtttggaactaatattgcaaaagaattacctttttggtaaactttcactagtagatcctgtacacctgggtcttcaaaaataacgctgacagtttgaaggactgcctcctgttgaaataaccaaaattctagttaacaattaccttttatagtctaaagatgtagctaaatcaaataaaattgctcgaaagaaagccaaacttggctagttctcaggacattcctggaaagttgagttcattggtgcccaataccagttgtcagataatactggataaaattggctagaaattagcatcaactaccttgaactaaccagctccgtgctcacttaactattcaagtattgagctggcttttctacagtcttggaaaatattatgctggattcactaggtggtgctgaaagagtgtttctgacaagtgtcaacctccctgcttttgtcagtgtttcagtttctgtataatccaagcatctctaaccaggaattttggcctcaagatcatgaagtgcacagtcagatgtgtaacatgcacagagttagccaatactttctagaagcaaagtaaatcacaacttgcccataagagaaactacaaactttattgaacactagctatgcccgagctttgctaccgataaaaatatattataatattacctaaaataaaatgtcttacctatcattttgctatagggaatattcaccttattttgactttatatgtgactatccatttagattaaattgatttttaatactaagaaattcaaggggtaatttgcaaaactacaatgggagtaggtggggtggcagattcactgccagtctaaccatcaccactaccttcttttaaagtactatagagtatagatataaattacttaaaagatgccttatctataggtaatgacaatatatgcaattaaggcatccttgtatagtaaaccctgggcacctcaagaaacacttacgcagtggtcagcacatgaggtttcatttcttaaacctaagcaaatgaatcatacacatgtactacatccgtcccaaaataattgtaattctaggttgtttagcataaattaaggtttgagaaaaaaggctattataccctcactaaatggtgtataggtaagaattggagggtagttgagagtagaatagggagaaatttaaatgagaagcaattgatgagataattagtactctattgtgacaattattttgggacaaatttgtatcctagaaatataattattatgggacggaggtagtaacagttatgtcttatgcttgtaagatgtagaacaaaccttggcaacctcaagaaatcctttgcaggtatcttcaaaattaacctgtaaaacagaaattttgctttgccgtgaagagctttaaaatgcttaagtgtgtaactgcaaaggacaaactgcagaaaaacacatctttaacctatgtcaatgccaaagtctctatgtattctacatttctacaacctgtaatatgcttggctctcagcagatatttatccacccagtttgctcaatcaattcaaactatggactcatcaacagcaaaactgattccaggcgaagtcacaataggcaaaaagggaatgtgtgtatttcggacgcatctgcatttatgtaggttgtaggataccacaatagaggcatgattttacaagttttggtcaacgaagtaggaaatattttacctccagttttagttcattttatatccatgcacaaagaccaaggaactttagtttttttttacgtagattgcctctattcattacccatctctctaaaagtactgacaaaaggctatcaataggactgtttggtcaaaatgtagcctagaaaacacagaacttcaattgcaaaccaatgcttcctaaaatgtcctttagactggagatccatccctccctttctctctgctgagaagttagaagtagctgacagaatggaatctaaggagcaatattagtgactcattcgcacctgctcagcatagttttgtggaagcgcttccaatgtactgctacttagctctgatgaaagttcgtagcaacgcaggttgttgttaatctgctcaacaaattttatgtcaaatgatatgaaattaaagtagcagggaactcacatgcagtccttaatcgagaaaaatttacataccaatgcacatagagattccaagccaacatcagaagctggttcctcaagtctttgcctctcagctgcttgaaaatcaagcatgacctatattataaaggaaacaaagaagatgaatttggcatctttcagtaattcatgtcaacagcaaagcgtaacaaaaccatgtaaagaacatcatcatgaagggttaactgtgtaaatacctgtataactgcaagagcaatacgatacagcatgacatctgtgctattttctgtaacaatctgcacttgctcagtcaatattctgaacaaatccacagctgcaggtgtatatagtttcccatcctctgtactttttggtggttgtgttttgtcagcctccaaaatgttactgtaccatttctacaggagcaaacgagtgaagttacacaaataataatgattaagttcaaaatgaattcaacagatcaaaaggagtaccttagttgttgcttgcatacgttcgacatacatattcatgaggggatccaatgcaccactttctgaacaaacttgggcaagagactcgtccacaccaagaccgataagattttcttggtatttcacaacccaacctgttacctacagtgaccattcatttaatgattttgcaatatacgagaaagcaaaccaaacaagtgatattcatgaatcaaggaaaacaaaatgctgacaatgcttgcggttttcacatttcatcttgtggaaagtaaatttagcagaataaaacgatggcatttgaattcatataccttaagaatatttatatttggaatatcatttgctctatcactgagaagtcttagcatctggatgaacctttcagtatacaggtttaccatgagctggaaaatttcatatctgtatagaaacaaaaaaaaacatgagactgaaagaagttagtgggatatgaagaaacagctaggtatctttctgcaaatcaccatttctaaggagtaagtatagcccccatgtcccaaaagaaatagcaattgatgatatatcaaaatgaaatgagaaaaagcaaagtatcatattcttcatccgataagtttcattaagcaatacataatttgtgtatgagctgatgtatttaaagttagaacatgacaaattatgtcacgttcccatctattggattaggatggcatatagtgtggcccatcataggagataatctgtatctttgtattgctacagtaaacagatcctcagttcttgtgtacacagaataaatggttgtgaagatcttctaaggataagtatttcatataataattatcaacatacctaggaggaaaacatggtgcaacatagtcatagatatcaccaagctcatctccaatctgaattgcattaggaatagaagaatgacccatatcagttagataattcagttaatcaagataagtgtgtcctacagaaatagcagctattctttgccaggttgcaaattgaagaacaagaagggttaagatgtactaatggaatactaattgctactaataactaaaagaaagaaaagaaacaatgtcaatcgatacttcaccgagtcataaacaacagtactgtgggttccatcgcgtatcaaccacatcagccattttcttttcaatttgttagacaatatcaagttgagaacaatggatagaacaagcattggccacgaagctagagcaccaagacaatctaaggagtctagaattcttcatatgcgtttgtattatagcaagtgcaaaaacaacagagtacttactgccttagcttcctccaaagcttccatcaaatcttctgagaaaacaagctgtgcaataaaaaaaatcagctacttgctgctaactgcatggactgtgatgaccacacaataaaatcttaagtccaggatatatttaagcactacctcggtgagcagtttgtcgaagcgagcctcaacagccttcctgatatactcatagcatttgtccttgtagccctttccctggacctttgatttatcttgagtgcttcttggggtagatgttgctcctccacctttcctgctacagttgggcaaggatgagtcagaactatgagcagtcagtataataaataaaatggtttaataattactatttgagtggttctcacattggttgttggttgataatagatatctagagataatttgaataaaacaacagttatacaagtcatcatgacaatagtaaagcaattcatgcagaccatagcagacaaccaagttagttacacccatagtcccgtacaatagcttgaatttgttgatctggtagccagtctctggtattaaagatattatatatgaaaagcatgatgtaaaaactttaatgccacctttacaggtgcgcagatgcacagatgctgatatggacaagaagtgcgttagtactcatatcttcagtacagttatatcagcatgaaagtaaagggacatgacaaattttgtatcctaggatacattatttctttgatcctctgaaacatgaaagatataatatcaatatatcatactacctagcacctactggaagtacagaaacatgtgtgaagcaaagaaaggaagaagcatactttgcagttctacgctggtttgctattgtcgccatagcacctgcaccctcagcctcagctgcttcttctgcaacttgttgatctaggatctcttgcatttcaacaaccctaacataagaatgaatttaaggattatgtgcaagatatataagtgcccattacctagaaactaaataagaaaaaagaatcaagccaattttctaaatctcaaatgatcagcttgtatttatgtattatttccctaataaatcaataaatagtctttcattcaacaagtgaactgaaagggaggaagccagggggaataattgctccacagaagaaattgatgggcaacaagtatcaaactatgagctggtccaaacattcagctttcacaattgactgtacaaaatgatcaaagtagatattaaatagttcatgcataccttattgctcgaactaacgtctgagggctgcacaaagaaaaaagatagtgagtttaatacaggagcatttgtagcagatatgcgttaaatagaaaggcagtgcaattcatataaaaacaataagacaattcattcatttaccatgttaaatagcaaagacaaagtgaatcgtaataaaaggcagtacctatcttttgaaagtctgaaaaagttagtgacatggccccacaatgctttctcaaatgtttcccatgaacgatcaacatcttcaaagtactctctgtggagaagacaataatcaagcaaattatagatatatacttcattgcactacaaactagaagaaagattaaaatcccttgttaaccctaacagtatttgctatcatactgtaatatgtagagaagatcatttctgcatttcttccttaagagtcattgagccattatataccttgttctattttggatcttctacagtcgtttcataatatagtagaatcaacataggatcataagtctgattttcttcagataattttctgattgcagtagtattacttctgctcagaatgctttacattattctaacgagaaagacaatggggacgttaaagggtgggggcgtgggggggggggaggaggcaggtatgcattgaataatcattaatattagctagtttcaggggagaaacaccacctcaatcgaccaacttcttccttgtgagatgcagcagcagctaaagcaaaacgtctctttccatcaagagctgttaatctctaatttcaacaaataagatcaaacagcaaagtcaggcaagtaggatataactatgatcaattcctgatttaaaaaaagagctataatatcaatcatggtattgatcagtgatccaaagagggaaaaatagaacctcataagtgcgaattaactctttatcatcacttagcgagtcgcgtgctgcagctgcttcaacagaaatagacatcatacctcccacatcctaataggcattgacaatcaacatgtcagatgaaattttcgtgctcgataacttggttagcttaatgtattgataagaacgttagtaaaaaacaagcaagtacaaccttaatacagttgttattgctaaagtaaggtcagcacacctttaaagttgtgttcaggttatttcttgcgttgctaagaagcttaatcttgtcgtggttctcaattaatgtttgacactcctggcacaacctgccagacatttatgataaacaggactgagaaatgaggagaaacatataacctcaaggaagtgatctagcatatcaatcatgcaagagcataagaaaatgtagagataaaaatattttagcttacttgtctatatctatgaagttctcgcgtagtttgtttattgtttcctgagatagtgcaagagcattgatgccagcatgggcttgctcaacctataagtgataaaatatgcacatacagaaaaactataatccaacagacaaacattgaggggggaatgcaaatgatagtagcagaaaccgtaactcgagcaaagcattaacaatagcattaaaactaataagtttggcagttcatagtagatgtcaaggaatacctgctctgctaccattgtactgagctgtgcatcatttgtctgagaatttatagaagacagttagaaatccagaggtatataatatgcatatgccaatatatgctttacaaaatggtaaacatgctcataatatctcactgaagataatatgcatatgccaatatatgcattacaaaatgggtgtgagcacatacgcacatacacttagccatgttttataatttacttgcatgtctacatttaagcttgccgaacatcccagccatatctgagaactgagacaactctgcccaaacctttttaagaaatgcccaatcaagtctaacacaaacctttgcttaattagtatgttttgaaaccctttggtaagagataacaaccatcaagaatgtgaggaacaatagcattgagataaaccgtcgacataggaccaaaaaggctaaaaacaaatcctggagtacactgtacaaagctacacgcaagtgtggagtaatcaataaggagaaactaagccttgttgtgatcagcaggatgtttgaggatagatgcacgcattagatggtcaaatgtcatttagctttggaagaagtccagcaatcaattttattgtaaacgcaaggattgaaatctcttcccttgaatattcattctgatttgctataattatggtgacaaattttttcacaaaacacagttgaattttcagctttaggatggtatagagatttgtgtttgctgagcattcacgcatgcgttttacttcttttcttggcttcctttctcgaaacttgctcgtgcctcctgagccttctaacatttctgccagtctaccaaacatgcatgttgatatgaccgattgatcagtattcattattcatcattatcatgatgagaaacgaagaggatcaccagtagccactatatctattacaccgtaattacatactacttacatatcaattacatcttagttacactataattaattcctacttacatttgtatttttttgttgtatgtgactgtaaaaacaatttgactgttttttgatgaaaaatatggcaccacaattataggtatgccttaggataaaagtagcaagtgggcccactgaaaaacgtaagtaaaaggaaataatagaaaaggtctaaaccatgccatctccttgtttttttttccctggttcttctctctactatccttatctgtatactaaagtttaattttcaaaccatatgaatagtaacgaatttgcttgcacagtaactgctgatatgaacattagaccaggaatagctaatctgcatagatgctgcatataatccatcagggttcaccgagcaacacaattttttagcactttgcatctgcaacttagccaccacaaaattctgagggtagcaaagtattttcagaaaccatggaaaattttattagaattcgacggaagtctcagggacaactatatcacgggtaccggatcaggatttccgcacacctcaccacttcacaggcacagtactacaatttgtgattgcactgatcagcaacgaatttgaaccagcctaattttcaagcatttcaccgtaacaaacaaataactacctgatgctggttaatctaagtgctagaagctgagagataggatcctgccgcgacccacaccactaaattgcagccacatcacaagcgacgcatcagagctcagagcgaaaaacaaatcagttcaatgcgacaggtcactcagaaggagaatggagatgactatcagagttcgccgaatctatcaaccaaacacttcagaaattccgctacgtttggcgcgaatcgggtttcgagggagggatcacatcacctgctgccgcgcgaggtagtcggatttgatggaggcaatggaggagaggagctccgggagcgggagcagcttcgccacctcgcgcacggccgcctccttcgcctcgatgcccagatcctccatgacagcacggccgcggccgacgccaaccgctgccccgcgcccccggcctgccgctgcagaggcgcacgaaaccgaggcggcgggtgagtgctcggcggggtgggaggaggaggaggaggagggcgcggcgcggcgaggcggggatgggagacggagatcgtgaagatggcgtggtgttttgtttcgtcggaccccggtggttgatgactagcggagcggggagaagagaagcgaacgggtgcgagtcgtgtgcgtgaccgtgtgagatctgacgggttctttcgagagaaacgttacgcgctgcagaataatattcactcatccgaaagaaatactatctactattagaagtcctttttaagagaaaatcactcaactttttttgagtaaaagtaattccttcattctaaaatataataattcaccctaaaatattagtgtggatatattttaggatatagggagggctgtataatatagtccaaataaaataaacaggagcatggtgtttctttccctctcatattcaacccattttaaagcactggtacagcaatccacgtgacataatatttgatgaatacaaattttaataattgatgtcatcaaattttcatgtcgaaggaggtggacaacaagaattcttcctatgaaatcacgtcatgtacccatcaacagtatttgtctttatacataaacacaataatttcaattagactcaatgaaaccatcccattacagtaatgagccgttttaacttatcttaaaaataattacaaagtcctttactacgtaagaaataaattggctacaattttcaaggtgtcataaagattttatgttaggtttttcagtttttcgaaaatttcgccaagagactttggacagataatatttgcttatggcattctagcttttgtagcaacctcataagtgggcatagtggaaagaaatattcaatccaaatgtccaaaataagcatgaatgttccaaaataccaaaatcaaattgcaaatacaattggttgatgtttttatctgttatacattatatttattttttttgaattaaataattacattgtgtttaactttttttcgaacaaaatagcaatgcaaaagataaagtatcgtatgatgtattttaaaaggaagatttgagactggattggccaagagattcatcatgtgtatcggtattttaaggttgtttagtaaatattaaagataagggaaatagttatctcagtagtcaaattttgaattttcaattgtttggattaccctcctatatacaaaatttgaatcctaaaaatgtttatgttttggaacggagtgggtagatatttaaggtttaagggaaaaggctgttcagttttttaaaaaatttcgacaatcaatttcacattagaataaaagtgtaaaatctaatagatgtgtgatatgttatgataatactttttaggaaaatccacatgtataatttattttgttttctaaactaagcatttgagaaataactcacattgatatgcaaaatttttaatttttgaccgaatctttaacataactaagcgttcgctagttctaggatatgctttcggagctatgtagctcacaataaagtggtagaagcataggcttttttttatttcaagacaaacaaaatattaagaagttgtcttaaaaatagaaatgtacttataatgtaccatctatgttttttaatacatgatgccattgacttttgacaaacgtttggtcgttcgtcgtattttttttcttcgaatatataattttgtacataatacttacaggacctgtgataaatcaagcacaaacaaaataaatgataattatacattttttctaataaaataaatggtcaaacgtgtcttaaaaagtcaacggtgtgatatattaaaaatgatggagtagctatttgatagtaagattgttcaattgtgtcattattttcttctcacttggtttagcaattatagtacaagaggtagtgactagttaaaaacaaaaaaccttgtgagactaagcgaaggtaggggtggatatcgagctggctcggctcggctcgctctagctcgttaagataacgagctggctcggctcggctcgctatcctaacgagctaaaagtctgtctcggctcgggtcaattgtaagcttgagccagctcgtttagctcgcgagctagatttggacgacgcatgcccagagctgagctggatctggaagggcgagcgaacgacggactccatggccgacgagtcaagaaggagcaccacatagcagcgccggccagacctcgtcggagcagtggactccacgacgaccaacaaatcgagcaggaggagggccacatggctatggcgcggcggtgctggctggacctcgtcggagcgacgtactcctcgggcgacgaatgaacacacgcggatgggaggtgatgccggcaatgcaacgaaaggagatggggagttatctatttgccttgccaaggtggcggcatatggcacaccggcaaggtcacaaatcacaacaaagttggagcaggagaaatgtggttaggtgtgtgctgtggatagtgttgagtgctcgacgagctcctgcttctacgggcggccagctggcctatgaagacgatggccaccggtgaaggtgaggcacaggcatggtggagcaacgggtggagtgtgtgaccggctagagacaactagaggagagagagcagcaatagatcgaggggattggggaacgtactggagacaactccaactacgatagaaaaagttctaaaaaaagggtacagaagatgggcctttttcttgtccttttttcttataactaacgagctaaaacgttggctcgactcattacaaaaatacaacgatccgagccgagcgagctaatgagctacgagcttttcatcctaccctaagcgaagggaaggacaccaccttgcgaaaaactaaaacagtactgtaacacaatgtcatagataagatagcaaggatgtgtgtgtttataaagaaagacgtcataataacgatccactacataaacattatttagttatattcataaaatcccaaacttacatgacagaacgaaatgactaacaattacaagtcaagacagaatgcgttcttccttttcatcgaaacaaggaaaaaatataaaccactaaatcaatcaacaaaataaacaaatttccgcttgcttgtgatgcatgctcttgttattttccttgaaccacggtcattagcactgaggcatgtttggaggacgaggcagcatctgagcctgcggtgtcttgccgtccttcacgatgaacacagtgtccatcccccacaccacgtggcgatcaaaatggcaatgcatgaaccacacacctgaacaatcaaaataaacacgaaaaaaatattaaaaactgtacataaagaccaatatcaaagaccataatccgaaatctgaataactctcacctggattgtctgctcggaagcggattgcggcccagccggacctgggcacagagaccgtgttctggaacggcgggtcaacgaggttgtaggtcgccgggtccctgctctcgtcgaaggtgccgttccctcgtcccacgacgtagaaggcgaagccatgcagatgcatagggtggttctcgctggacaagtcatgaaacaccacctctaccacagtgccgtactccagcaccttcaccttggtgccacgcttcgtcatcaagggcccactgccgttgttgacgggcgggtcgacgaaggctgtcggcttgttggggaagtcctcctcgtacacgccgtggccagagctatagtagtaggcgtcgaggacgtcgatagccgggctctggaagctaacattgttgaggctcgccgcgaaccggttgccttggggtccttctttgcacttctctgccatgttggtggggtcgcagggaagaacgttgatgtcaatgtcgatgagcatgtgctcatcgacatgtgtcggtacgtgcaccgggtgttcctggttgcctaatgatctgagctgcgtgacgaacgccatcgccgcgttctcatccttgatggccggcagctggacggggaattccggtggcccgaccggcctcgcggtgacgctgtccgtgtactccacgatagccgtggcagtgctattgttgaaagggatagtgtcgagcggtaacgtgataaacgttctcgcggccatgtaataccggctgttggatcccaaggtgcgtttggcctcgaggagcacgtccatggtctggccaggcgcgatcatgatgtagtcgactgtgagcggcttggtgtagcgggcgtcgatcccgaccacggtgaggcggtgccccgcgatggcgaagaacatgtcgttggtgagtccagcgttgatgatcctaagcaggtacgtgttgccctgctgcacggccactttgaacgtgtcgtccctggagcaggggaacatgtccccaggctgggcgttgatggtgttggcgttggacggatccacgtctccgccgaggagctgcgccttgtcgagcacgtgctctatgtcgtcattccaccactcacctgcagaacatcatagagatggttaagatcaaaacacgtacgaagcattgcattgcgcaatggaacattatcaaattaacaagattagtttgttgtggcttgtgtataccaaggatgacgggtatctccttgtctggcttcttgaaggggaaggtggtgccgcgcttggggtggatgacgatggcgccgtggacggtggcgcggtcgaagtcactgtgcgcgtgccaccacagtgtgccctcctcctcggacaggatcacctggtaggtgaagttgccgcccggccggatcgggcactgcgtgatgaactccggcccgtccgaccacgggttccgtggctggtccacgccgtgcctgcgccacagtaaaatcatcgagaacaccgtaagtttcgagccaaggataatgctcttcttctctgcagcaggtggcaaaacggatgtggtttaccagtggatggtgatgtttttgttcccgttgttgtggacgttgacgatgacgaggtcgcccttgcgcgcgtagatggtcgggccggggaactgcccgttcacggtgaggatgctcttctcgtggcagagcctcgtgtagttggtctccgtaatctgcagggggggcatcacgcatggttaaaactcaaaactcatttcgtgcattcatgcctgtacatcggcatccatcagtgaacacgctagaattcaagtagatcacttacgaagaaatcgtagtggcgagtcttggcgccatgagcggggttaactgcaagtgctaacaccacgcctgctagtaaccaaagcaatgcaggtaacttggctgttcccatcgccgaacgcacacaattcaatcgccaatccaagggtaagaaacacagagctaattgagattctgtatgcgattaactgtttggttcttgcacagtagctaactagtgccgtaagctgctgatttgcagatggccatctggccaaatgtatttataggaaacgcaacgcacccatgcatgaatctgacgactgatgactattctatataccgccctgcagcccacctattgtcccacggaactagcgaatcgttctccagcagccgcggcgtgaaaaatgttaaaaatggcgtgagttgattgtcgggcctctcgctgcgtgttttgtttgtgctgtagttgtatgtatgtatgcatgctgctgtggcgacgttgtccagcctttggaccagccactaaaaaaatgtatagccaggaagattttgaaattgactgactgacgacgacatcttgaactagtccttcccagacatgcgcatccgtttcctgcgtctttacccaatcattaacttaattatagagtagtcgatgttgttaacgaactgactaatcaacgcggaaattgaccttgagcagacacacatccgtatttcgttgtaccctggtggggcacgtaagcacttgatcaaaagtctcattgggcacgtttgcatgtgttcggtggccatgaagattgttaattcgattatcatacattgagtaggtgggttttcgtgatttcgtcgtagcctagcgaagtaaataagcacgcactcgattaagtctcaggttgtgtttgcatctccaggatgggaactcgttctctccgcacaaaaaacggagcagtctattagcgcgtgattaattaagtattagctatttttttaaaaaaaatagattaatttaatttttttaaacaattttcatataaactttttgcaaaaaaacataccgtttagcagtttgaaaaacataagcgcagagaactagcgagagggttgggagaaggggttccgaacacgccagcctcaaagggcacgtctgcatgcgttcggcggccaggaagcttgttttctttttttctaaaaaaaataaataaggaaagaagggccgccaggaagattttgaaattgatatcaaacattgaggctctcttttgacgcatctcccgatccaagattttttaaattgagtattcttaacatcacaaatacttgataaatcatcgataaagctataatcacgtcgatatataatatttggataagttatttcgtttttattttaggtgttttttaaaattttaaaccactataatttaacatacaaactttagatttaccgtggatataactagccattaacagttgtaatgttacggatttcctccttttttgatttttttcggctcctcggagagttttacgcctgttgggattttctttttaaaaaaagctcctcgtatctgcacggaatatcgcatatgttcttggaccgtctgacaccccgttgtgtttcttatgtataataaaatctgaagctatgtcaagcatgacttaaatatctttctcatatctatttataagttattggaaggaagttttcaaattgatctagtgcaaaagtgaagatacacaacaatataaacgccagattttttttggaccgactatatttatgttgatataatcttttcttaaaaataattataattttcaatatgcatttacactatatattccatagtttgcactgaagaatcgtatcttgcacggtaaacaaatcaaacgccatgaaaatcaactgtaatccactaaaaatatgtcaacgcaattatagtatttttcctacaaataaacactgaaattgttatacatctatcgcaagattttttgttagagatattgcaattttttgacaattgtatttttattgagattcgtgctagggacctaaaaaaaatgcaaatgtgtgtgagaaaaaaaaaagcgaagtcgaggaaatatgcatttgtggtcatagaacttataattcaaagctcaacgctgccattgctactgtgcgactgtgactgtcacttaacgctggcaatggcaacactaatcttccagaatgtgaaaagttaatccagagagtgcacaatgatgacgtttgtttcagattaatgttattataatctagaatattaaatcatattactgtaagctagattataataagttgatataaaataagttgtgagttgtttgtttgttttattattagagatatataggggtagtgattttttgttgggtggctaaaaaatgtcctatatgtctccaataatctataatataataagtttatactaatctgacttatggattataataatctatcatattccctccgtcttaaaatatagcaatttttggttggatgagacgtattctagtactatgaatctggatataagatataaggtacatcttatccaagtaaaagttgatatattttgagacggagggagtaataatttacttgtttatttcagtttacttctaataatttaaattacaataattctatgctgaatcaaacatgcggaaaccaacataattatcactgctgctacgtttctaacatccaaatgcaaaccaaattctacagctgaattttgcaaaaatgatcgtgaccgcacgggccgcaagccagcgtaacagccggacaaattggctggactccaattaggccgttgatgggcgaccgctacaagcaaagggcggagcctacggcccaaagaacaggacaggtttgggcgtacagcgtactccctccataccgacaaaacaagtcgtttaaaacaaaattgtggttaccaaggagtgattaatcagggctattctttcatgttttcccttattaaatgagggtgcgggtgcattcatttgagaaacaaacagaactcaaatagctagtgcagtgaggtttgaaggcttagtgcctaggttcgattcctggtgggcttgttttttttgctgattttgcatggtgctcgtttgggccctcgtcaacagtgtccagcgcgtcgacggagtccggcgccttgacgtactctagcgactcgacgtactccatcatggcgctcggcagccgggcggcaaggaagagagacgcgcgtgtgcgagcggcgagcgtgtgcgagcgacgtgcgtgtgccattaatcacgtccattcagcttaaggcggcattaatcacgtcgcctcgtttcttgcctcgccgctcgtcactcggctctcgcatcaggggcatacgcgtccaaactataccccactgaggaacgacgacttgttttgtgaaaacggactaagagcccagaacgacttgttttgtgggcgtggagggagtactaggctcatcgtctcatcccctccgcgaccgcgagcgcctgcggagctgcgcctcccaagctgcggattacacaacctcggtcaaaaaaatcacccactctctccccgccacgtctcccctccccggccatgggagcggccatgctcctcgctcccatgcctctcctcctcctcgcctccactcccctcgccgccgtccacctccccacccgctgccgcctccgcctgcagctcctctcccgcgccgcgcccgaagccgcctccgccaccaccaccaccaccaccgcgcccgacaaccacttctctgtcgaggaatacctcatctccaactgcaatctcacccagccacaggcccacaaggcgtccaagagcatcgcccacctcaagtcccgctccaaccccgacgccgtcctcgccttcctcgccgacttcggcctctcccccaaggaggtcgcggccattgttgcctccaacccgcgcatcctgtgcgcccgcatcgaccgctcccttgcacccatctgctcggagctccgcgccgtcggcctctccccctcccagatcgcccgcctcgcccagatcaccggccgctacttcctctgccgcagcttcgtctccaaggtgcggttctggctccccctcttcggctcatcggagaggcttctccaggccagcgactggaactactggctcctcacctccgacctcgagaaggtggtcgagcccaacgtctccttcctcaaggaatgcgggctaagtgctcgtgatatttccaagctgctcgtggccgcgccgcggcttgtcaccatgcacccggattacgtcaaggacgccgtgcggcgtgccatccagctcggcgtggccccgggctcccagatgttccggcacgcgctctccaccgccggctgcatcggccaggacaagatcgacgccaaggtcgccgtcctgaaggagagcctcgggtggtcgcaggaggaggtgaacctggccgtgagcaaggcgccgcggatcctggtcgcgtccgaggagaggctgcgccgcaacgcggagttcttgatcgacgaggtcgggctgcagccgcagtacgtcgcgcggcggtcggtgctgctcatgtacagcctcgagaggaggctggtgccccgccatctcgtggtgaaacttctcaaggagaggggtctgatcgagcaagaccggtgcttcttcaacgcggtggcgccaactgaagagaagttcttggagaagtttgttgtcccctttgaggggtgcgtcccgggtctcgccgacgcctacgagtctgcctgtgccgggaagacgccggtgcaagctgagtagtgaccggacttgggggagaacaatggaggtgtgtatgtgtgtgtgtctcacttccattggataacttcattctactgatcaactatagcagggatggcagattcaattcatggtcattttagtgtaggtttcttgcagttgacaaggaggtggatgtgtataacaaccttgagaactgttcagttgtggttgaacaatgttcagtgggttttcatataaaatctgtgagcattacgtctcctatggtactcattttctttgttacaggcttacactctagctggcttctggcatgatcagcgatcacgatgtcctgatgtgcatcttccaattccaagttgaacgagagaaagtgaagaaccatctgagcaaagatataactagataaattgcgggactagggaagaacactctacataaggagatggaaaaggttgatctggttctcagcaaatcatcagaatgaggagtgttcctctacggcatagaacaagttgcggctgaagctttagaagaggttatttttcaagctgttcaactggataggcagaggctttcctatcgtatactagcatgtttcttggattgcatgcctactgttgcaaagcaaaaacttaggcaacccaagattagaaaaagcactactccatatacttcattcacccgtttctaaatatttgacaccgttgatttttttttaaacatgtttaaccatttatcttgttaaaaaaattaaataattattaattcttttcctatcatttgattcattgttaaatatacttttatgtagacatataatttcacatatttcacacaaattttcaaataagacaaacggttaaacatgtgctaaaaagtcaacggtgccaaatatttagaaacggagggagtaataaagagagtgaaaaaggatgccgtggagttgagtaggcccaacaaatccgggatttcatgggttacagtactttgggctaaaattgtgttccgtaggcccaagatggaactcgatcacgggccttatttcttcttcccgtgaagactgaagcccaaatctccctcaccacagggcacgataccgccgtccgttcgcggcgcgacccttcgccgccgcgccgccgcgccggcgctatgcagcgcctccaaaagcagctccttcccgccctgcgcgccgccttccctctccctgcctcccacttcagcagccgccttctctccgcctccaccgccaccttatcccccacccgcttcgtcgacgaggacgccctcgtcgccgcctgcggcctcaccggagccgaagccctcaaggcctcgaagcgtctacagaaggtaccctcaaatctagacgccgccctcaccttcctcgcctttctcgccgacttccgcctctccaaagacgacatcgccgccgcaagctcacggtacccgcggttcctccatctcaaggtggacgaaaccctaacctcccaagtagcccggctccgggatatcggcctatccactcccgagattggccgcctcattaccatcgccccctgcatcctctccaatcctcgcacgatctcccgccttgaattctacctctcctttttgggctcctaccccagggtgcactccgcccttcggaacaattcctcccttctacggcgaaacaacatcgagagtgaggtcaagcccaacattgcattcctggagcagtgcggcctaactacttgtgatattgccaagatcctcatgtctggctctaggatactcattatgcagccagagcatgtcaaggaaattgtggcgtgtgcagacaagttcggtatgccccgtgagtcagctggtttcaggtatgccctgatggctgttaccggcatcagcccagtgagggtcagcgcaaaacttgatttcttgaggatggttattggatgctcagatgcccagctacacattgcggtgtctaggtttccactaatcctgacatactcagaagttaagctgagccgctcactggaattcctgaaagcggaggttgggttggagcctcagtacattgtgctccggccagcattgctcggctatagcattcagaaacggctgatgccgcgttatcatgtcatgaaggttctgaatgaaaagggcctgctgaagaaagacactgatttttactctatggttaaaatagttgaagagagcttttttaagaagttccttctcccataccacaggtctgttccaggacttgaaaaagcttatctggctgcccgtgaagggaaaatgtttcctgaaatctaaaacagagatgctggaggtttattctgcctaggaacttgataatgttctgcattttacatcttgctcagttcttagatgatttctagcgatctgtatttgtgatttcatctgtgctttttgagacaaacatctaattttagtgcactcttgttctcattttaatgcctcgcacaccacaaggatttttgcatgcttacttaaggaatgttttagcctggagttgcgctgcaatgctgcaatttgtttgtcagccgatgcttctgtatgatttgaacagatctatagccagctcatgaatattactgtttagtgcattgacgacttcagtaattgcgccggtttgttaatctggttgtaccagagtttattggttatacccatccgtagaattatctatataggaaaccaaataagaagttgctttttcaaggtaagcagttttacagcacagaaaattttctcctgttttgggggagaaaaaagagagaaatgctggtgatatttagttgatggtcctgctttgaagaattgaagttgtggtgtcatgtactccctccgtttcataatgtaagtcattgtagcatttcacatatatatctatctagattcattatcatcaatataaatatgagaaatactagaatgacttatattgtgaaacggaggaagtacaaaatttggtagagaaatggagagttccagtatggtgttaacacaagtctacaggctacagctaaaacccagcaaggaggaggaaattgatagaatgcaatgcatagagttggctttgatagggtgtatccatgttttgaaatgctacgggatttcatagagcacgacattcaatgtttacagtttttctgatgggtcgttccgtcctactgtatatgggtgctagaatctaccacggggctgttcagattgttgctaaaataaaccctgtattgccaaaaattttaataagttggtaatattatcaatttttttttgagaataatattatcaaaattttggtagaatttctcatgtgtttatcaaagtttagcaagaaaataaatgtatgcacacctttgtcaactttaccaaaaattggcatcaatctgaatagcccattcaattttgggttaattggatccatgccactgcaaatgtggcaaatcagaaaaatgccactactattcacgttatcgggtagatgcccctgtaaatcttctaaaattagaaccatgccactccatgatttccaccgtttccgtcttcatcttctcgtcgtcctcgtctcaatgacggatgggcagctgtaggacggcagcatgacgacagatggcagcacggcgccggaggagggtagcacgtcagtggatggggaaggagcggcgagaggacaagctcttccgccctccccgcgcccctctgtgatcgtcctcgctagcggtggccacgcccgcctccgcgatcgtcctcgccggcgactgcgcccgctccccgcgcccctccacgacctccccgcgagcatccttgccggcggcggccttgacctctcaccgctcgccagcgcctcctcgtcctcgctgcttgccttctccccgtcctctcgctggcaccgcctcatcttcgccgctcgccggcaccacgtcgccttctccccttgcagacgtgagtgaggaggatgacgacgtgagagaggaggccgaaaatagtgacgggagtagcatggttctaattttagaagattacagtggcatctacccgataacgtgaatagtagtggtatttttttgatttgccacatttgcagtggcatggatccaattaacccttcaattttctagctatagcatccttccgtgacgcagcctctcgtgatgctcccatctctgaagaatccactcgcccgtctcaacaccgtgtccttagagatatatccagattcatctccataccgtgtctctagatatatgtctaaatttatagtattaaaatgtgtcacgtctaatattagattggttttttaataagatggacagagtagacgttgttgccgcagtggcggtctgtctatcctcccgtctcgatcagcctactcacaatcatccgttccttatccgcatcatccccaccgccggccacacacctcctgccacgccgcgcgctcgagcgcctccaccgtccgatcgggagaccagcagatcccgcccgtccatcccccacccaaacccctctcttcctctctcgcctctccgcctcccaagccagcgcaaagccaagccaagccaagccgcactcctcgagtccaccactccgccgcgcaccactccccacctcccgacgagatggccaccctccgcctcacctccgtcaccctccgccccgccgcctccccctcgtccgccgccgcgccgcggtccgccaacttcgcccgcgccgcggcgcgcgggttcccctcgctccgcctcgcgccgccgcgccgccgcggggacctcgccaggcgcagggccgccgccgacgccgcggcggaggggtacgcgacggcgctgtccgaggtggcctcggagaacggcacgctcgaggcgaccgtgtcggacctggagaagctggagaagatcttcgcggaggaggccatcgccgagttcttcgacaacccgacggtgccgcgcgacgagaaggcccagctcatcgacgagatcgccaagtcgtcggagctccaggcgcacgtcgtcaacttcctcaacgtcgtggtggacaacggccgcgcgggcctcatgacgcagatcgtgcgggagttcgagaacgccttcaactcgctcaccggcaccgaggtggccaccgtcacctccgtcgtgcagctcgagtcgcaggacctcgcgcagatcgcgcagcaggtgcagaatctcaccggcgcgaagaacgtccgggtcaagacccgcatcgacccggagctcatcgccggcttcaccatccagtacggccgcgacgggtccagcctcatcgacatgagcgtccggaagcagatcgaggagatcacctccgagttcgagatgcccgcagtaaccctcgacgtctgatcggcatccaccaccctcccggcggcgctgccttggcccttaggtcctctcctcctgttgtctcttactcttgtgcaagtgcaacatacattgctctcatgtgattgttgaatgtttggtaagcattactgctgaaataatacatagctggattccaaaatttgcactgtttgattatcttggcctgcatattttttttagcagaatttgtagagtagcgtgtgttgcgttcactagctccatgtctcggcctcatgggggaagttttcaatagatttgctctgccaagttcagagtagaactgtagaagattgtcttgtgcgatggagcagagaaaacaatcattgaaagtagttcataagtgtgagggcattagggcaaagtggcgaaggaatttggcttttgtgatcacatgaggctgctcttataatctgcaaacctgtcaatctaatatgcaaatgcagtttaattagtgacagactgttcatccttttgcagctccattgtcacagggaatctcgaaggcttgtcaagaatgctggtcctcatccccttcagaactgaagatataatggaggaggctcaaatacatatgacgatcacgacaacattcttttctgcatttcttttcattttttggccggagccaatgtaattctcttttctttcgttgcccttgtaatttgcttcaaatactaaactatagcgaggctgctcctccattatgtacctgccgatagagtttgcagatatgtatagaaagtgccattgttttcatctgataaacgagatcaatatatcatgtggtgttccgttttatgcgtgccctgaacttttgcttcaatgtaagtcaggtaatatgccataaaacgttatactacctccgtactagtaaaggaagttgttttggacagcgacacggtctccaaaacacaactttgacttcttgtttctataaaaatatttatttaaaaattgatacatgtatacttttatgaaagtatttttcaagacaaatctattcatataatttttacattttcaaactcaataacttgagagttatttatgatttatattcctaaggtttgacataaacattgttctaaacgactttacgagtacggagggagcacaagcaaacaaaaaattaatttataagtaaaactttttttatctgtgttatttgtggtttaaaagcattgttgaaaactaaaatatgatgaaaaaaaccctctcaaaatcaactctaaaattaagctttaaattcaagttttgcagcgtcttataagtgtaccaggtttgctgctgagatttcttcgttttgctgcaaccttagccatgaccatggcatgtggcaagtgttactagggattagggttcatctttctgattgagcgctgaatcccgaccttcgacggtatgacagtttttgccaaatttcgatagattatgatcaaatttctaccaaatttactgttttaaattttaattttcgaaaaccattcaaaatttcacttggaatgtgcttccgtcccacgtcaaaagttcaggggcaggatctgctgaggtgcttgctcattaagttagtattttaattaatacctgtagttagcatttgtaatcaccaaggatccgtggcgcaatggtagcgcgtctgactccagatcagaaggttgcgtgttcgattcacgtcgggttcaaatccccgatccaaacggatctccttttttcttttcatttttgcctcatttttctggtaactgttcaatcctcaccgtccaactcacactaatcgtacgaagccgataatctgagccgtccaaaatcgcactaatccatccatctcctccccccctatcccctcggcctcctctccccccacccgcgccgcgcccctccctcccgacggcagttgccgccactcgccgccggccaaccctatccaatgcaaacctaaggggcctctccttttgacctaacccgatgctcgcctaccctaccacatcgagcccgtggccgccgcgccaccacggcgccgccgctgcccccgccgcgcggcggcacatggcggctgcggcagccaggggaaagaggcggggcgcgggtgccgcggcggcggaaggggcggacgaggccgccgaggcggcggacctggtgcggttcttcctccggaggacgagcggcggcaaggagcggctcgtggccgtgcttgaccgccacgtgaaggtggtccgcaccgagcactgcttcctcctcttcgaggagctcggccgccgcgacggctggctccagtgtctcgaggtgagcatggcgaagtgccccaatgcccgagtagtgaaaaaccctgtttctccttacgccctttaggtttctacagtaacaacgcctttctactgaaagtgagagacttttaccatggtttacatttcgtgtcacatataatctttgcctatgagcccaactcaaatcacaattgactagcagtatgcctgcttttgtgtactaatcccctgattgctatcataagtgccattttagggtgttgatgtggatcaacaagagatgaattttgaagttcctgtaagttggacatatctactggttccttactgctcttctattttgctaggttttcagatggatgcagaaacaaaggtggtatgttgctgataacggcatatattcgaagctgatatctgtgatgggaaggaaaggccagatacggatggcaatgtggctgttctctcagatgcggaacagtgggtgtaggccggacacttcagtgtataattctcttatcggcacacatttgcattcgcgagacaagagcaaggctttggcgaaagctctcggctattttgaaaagatgaagactattgataggtgccaaccaaatattgtgacatataacattctcctaagagcttttgctcaggctggtgacacaaaacagctagacatcttgtttaaggatctggatgaaagccctgtctctcctgatatctatacctacaatggagtcatggacgcttacgggaagaatggcatgatcacagagatggaatctgtgctagtacggatgaaaagcaatcaatgtcgtccagatgtaatcacattcaacatactcatagattcttacgggcgaaagcaggcattcgataagatggagcaggtgttcaagagcttactacgatcaaaggagaagcctacacacccaactttcaattccatgataaccaactacgggaaagcgagactcagggagaaagcagagtgtgtgcttgataagatgactgaaatgggattcaaaccgaactatgtgacacaagaatgtctaatcatgatgtatgcatattgtgattgtgtctcaagggccagacagatattcgatgagcttgtgagctcacaaaataatgtacacctgtcatcagtgaacgcaatgcttgatgcgtactgcatgaacggcttgcccatggaagcagatcagctgttagattctgtaattaagaaaggtgctgtgcccagtgcttccacatacaaattgctttacaaggcctacaccaaagcaaacgacaagaagcttattcagaagttgctcaaacggatgaactcacagggtattgttccaaataaaaagttcttcttggatgctttggaggcatttggcaacactgacaagaaaccccggacggtacccagcaaaaactctgcaagcaagccagatgtggagtccgcaaacaattctggaactgacacttcaagcaagccaaatttaagcgtttggcaagttgctgcgtgatggggcggtcagttagttcttacaagctcatactctgcgttgcctgacagcacggagaatgcaattaatttatctctaaaactgtctatagcagtatctttggagatacgagcgattgattggctcataacgcagttttctttatgtgaatgctgagatcttttgtgcgtcggctaatgctgcttgtagtcttgtagatttcatagttgtgttgtaaaatcagcataggggtttcttttttttccttcttttttgttcagctcctctttcgtatagctgcaagcctgcaattctgtctgtcagtaaccttgaggtttctgaagtatcgcttctcattgttgttcgcatctcgtgcgcatgttctgatagcttacctttctttgtacatggatcagtttatcaacttggtaagacgttcatggatcagtttatcaacctggtaagacgttattgcgcaggtgatgcatcctgacgatgcaattttgccactcggaaataacatgtctgtaacacgcttacgggcgtattgcgtacacaggaaaagcgtgaaagctggcggaaatgtccaattagcgtatacatcagacaacagtacatcatactctcataagagagagacaagcaaacctgcaaaattcaccagttcgatgagaacataagtacaaacttctgcaaatccggatgaccctaattgggcaatcctgaaaagatcaacctgaagattcccgcgatgacaacgggcaaaagtgatcttcaccaacaagtgaatagagaattatgacatgctaaattcaataatgcagtttttttgtgtcaggcctcgtacatttggagcgcaaaaccgtgctcgcctacaactggcagtccttacaaagatacaagggcacaggctccagatgagtttctccccggcacttttagctgcatgttcaaagcttctcaagaacgatgcaccagtttgatttgtcatagaattggtcaacaacaactgcattgtttataccagcaactaacctgaaatgaaattaatgagacaatgtgccagagataggagatatttccaaccaaaagaccagagatcaaacatactccctcaatttcatattataagttatttgatttttttcttagtcaaacttttttaagttcgaccaagtttatagaaaaatatagcaacatttttaacgcaaaacaaacatattatcaaaatatattcaatgttatatctaatgaaactaatttggtgttgtagatgatgctaaatttttgtataaacttggtcaaacctaaaaaaagtttgattaagaaaaaagtcaaaacgacttatagtatgaatcggagggagtaaaagcaaaactttagaatcgcaagtattgtgtatcataccattgttgcatagctaaacacaaaaactgatactagtaaactactaaactgtatgaaaatatctcaaagccaaacaatagaaatttcaaatcatcagtcaacaacatgaaatggagatattctggtgaacttatatataatgtgatatatcttaactcacgcattttcatagaaaaaattggggaaaatgaaaaaaagaaagaatagaggagcattttatactaaagctcagagtaagaatgcttcacctttgaagttctccttcaacaaaaacatggtaatagcggttgtagaccacagtacccttcttgtcatctctttttgcaaatccattttcaagagcagcagcagatgcaccaccaatttcagctcggtgaaatggaagatgccaaggaacaaagtactcctgctgggttttgtgatactcatcaatgttggaattgctgcaagttacatcggcgttatcatccaaaccatcattacttattttcagatcatcattcctttgcttcactgcacctgtgtcttcatcagtctctgatatgctttcaagcacagtattggattgattacgcactggagggctgctcggatcaacccactcttcattatacttctcacagaggggagtccacttgttgagaagtgacttgtcctcctgctccacagcccagacagtgatgagcaccagaccacctttccgaacaacacggatcaactcttcaatggccttcctccgcctggcatcagtacttaaatgatgcagtactgctattgaaattgccgcatcaccaaaattatccctgtatggaaggttgacagcatcagcaaccaacacttcatgccctctcccagcacatatatcaatcagtggtgggcttatatcacatcctatgaataaacagtcaggattgaagcccagatatttgccattaccacagccagcatccagtataactgaccctggcctcaacgaattcaagaatcctgcaaccttaggccattttgcaaagcgtgttgagctgaaatgtggggctatggcatcatatacacgatgcacatacttcttctctatgtcaggagtggactgaacactagaacagctgttgttcccctcagtagataccgtttcctgagctcccagcatttcatttgaattcatgggactgcttgtgctagtacttcgataatttgaactatatgaattcgatgcacagatgactcgttgagggattcgtgttgctatcctcgaaaatatttgtagcatacaaatcctacgtgtgaaaaactgaagattagccacactggcatgctggtaagcctaactcgttcaataaaatgaaatcgcaagtactattcgactgcagaaccttttacaacaaagaaaagggcaacggttaattagcagcatgcaacaattaacaataaattcgctgcacaacagatagtgagccctaaagctctggataagactagactcaattattcaaccgttcacaagcaaacctatcagaaattacgagtccagagtggggaaagcggaagctaaccttggaagagatcaaatctggcgtaagccgtctttaaggctgaactccaccaaaccaaaaatcgatgcagcgagtcagcgaccggccggtctgcctcctccctcggcggagacagcggaggagggccgaggatcccgtaccggacgggcacccgcacggacagccggagaaacccctgacacgcacacgagccagcgacgggtccggacgctccaagcgatcacgcttatacagcgccgtcggatcaccgacgggaggccgcgcccccgcgactggtggcctcttccacggcgcgcgcgacgccgagccggagagagagagagcagagggtggaagggttttgcggcggcggggtcgccggggttgggttcgcgcaagcggagaagcggcgcggaggcggagcccgggagccgcgcgagccttgcggcggaaaccaacggtagagatgggcgagcggccagaatcggacggcctgtaacaagcgggagagatgctattgtatttggtaaatgggccgctagatatattgggccgggccgtaaagctgttgctgtcacatcgacacatcgcagccaggccccacatgtcagtgacactataaagttaagttaaattcctatcttgcaactcagatttttggtatctccaggcttgttcactttattaccatttttaatcttaccaagttttagtatggttgctaaattttagcaagattttatatgtacttactaactaaatttaatagcaaactaaatgtagctactttttttttaactttgccaaaaaataattgggttgaaaatagtagcaaagtgattctttggcataatgagaaatttggcccaaaagtgtttccagatgggataactataggacagattctattttttttctttcctttttccgtccacgtaacagaataaaacaccccttttttcagcttacatatatgagtacaatattctggttttacatgacaaacaccagtgctaaaaagaatcgataaaatgtcaatgtggcaagagaaaaaagaaaaaggagagaatttttttcgttttcacattacaatttatacaacagaaagcatccaatccctgtcttctgcacactcgttacaacattaagatcaccatgacgcatcctccagaaaccttcagttccagctcccaagcatatttgacgggtgttaaagtatgtatatttctaggatttgaatggctctaaaattggatgtcaaaatgaattcacaagagctgcgaacacaggaaagcagatacaaaatcctagagcgagacattgtacatcatcatcaggcaggcggcgtatcacagtatggtacacccacatctgttctgcttgggggaattcgcaagctgcttctctggaaaggagaaaccaacaacacattatagatgtgtatatagaggtgtcaaattggtctagatgaaagctttaagcatttaattagccaaatactaccatataaacaacagaattatagttccatgagagtcaaaaccaaaaatagttgcagaatcgtagttttaaaatactttagttcattagaataagtagttattttctagccagatgtctataaacaaaaaggttttgtgaatctgtaggctgtagttttatgtgcaaagtgtaaacatggttgagaaccaacccaacacccatttcaatctatagaagtaacggcgccaaactgtcctatttaaatcttctaacatgtaacaaatctaaactgaagctatcaaaaaagttaatacagtttcttatgccacaagactaccatagacctatccatcataaaagcgtgttaatttgcgaaaagaactcgaaatattcatttcatgcctctatcaacttaggaaacaccagctcagctgctctacaatttccatgcaagtaattgaccaaacaatataccttgatcaattaaaccctacacaaaataaaacaaggaacaaaccgctattggaaaaagggctgggctcttcttgtgggacactgtattcagattacagatactatccctatacatgttcatctttggaggacaggacactacagtcttagaatgatacccagctgtagcataatttcattcgttgaatttaatagagttttgtgtcaacggagaagcgaaataggccatcagtgcagccagaaaaacaatgtgaaaaaaaagaaacaaaattggcggcaataccactgtttttgtcgggttgtggagggcgtactaccacatgcattgtaattacacctcctggaacctctcctactggaacacgggactcagcaagtgtccggttattctccaatatccgtccggcattaatgagcttcaggtcattgacagtttttggagttatttccttatctgccataaaaagataaagaacaatccctttaataaaataaatttggaatataaggataacaagtatggattatgaagaaattgaatctttacaaaattacaaagagaacttcagaatgcaggtcaatctgaggacatccagaaaacgttaattctcatttgtaatcaatagtatctcaaaaaagaaattgcaccatttccagccttcgagtttgtaatgcagtgtgtgttcaatgaaggtaaaagtactgcaggaggaatatcttgcttgcagacactgattcaactgggaaaggatcaaaggattcaattttacatgctctagtttactcaggaaggagcacctcacccaagcattgcacatcaagaaaagaactcctgtctgagtgtgatagtcagatggttttttttttttacaattgttggcctatccatttcctcagttattagattttccattctacacaccaaatctttctccggtggtcccaattaatgtaaacggacatccatttatacagcagcatcttttttggcaaaacatcagccagacaaaaggttgcactatgcaaaagattctggtggttgtcagtaacttcaatgtgccacatgacaaatgtggcccttgctgatcattatgcttaagtgtacaaacaaccaaatcatttatgtgttccatagtgttaatagaaatacagctgtggttgaaatcgtcacatccgtcctgatggtttcaccacccaaaaaaatgatacattagcaccacagtcggtgtccagagttcatccttaccgtttacttgtgaatggcccagcaatcatattgacgcaaaggaccaaagatgtgctaagttctatagtgctagcagaactaccttcagataatgtaggaaagcaaataggtatacaaaaggcataatactgttattaacatggcattgtgccgtcttctttgtgtctttactctttataggacataggaagactaccctctttcttgtttggcccttcatcgcacttatttgtgatccaaatcattgcctgaaatgtgttttttggggggttttctgccacaaactagcagaaatattattctggcaatatccgaattcgtgtggtcgggatttttcatggatgataaacatacactgagaaggggaattgtcgattgacgatgtatttatctggcatatccagttctagaaagctaagggggaaaagaactagttacgcgctactcagttggtcaccgtatccattcagagaagaacagattaccaattaacagtcgtctacgcatctgacacgagcaaaaccataggaaagagagggtaggaaaaggagaaaaaaaaacgccccacataaacaccacgcaaaaataagacggcgcaacacaaagcaatatacatgatccaagaaactacatgggatcaagaattatcacaagccatcgtgtgctttcaccgaatcaaagatgcagcagatcagggcaaaaaagaaaaaaaaaatccgtgtactcttatcgaattgatgcaggaatcttctgcctctcaccttgcggccaccgagcgaggatgaactccttgagcgcggagacggtggtggaggggtcgtacttgctcgggccgatgtccgtaccatcaaaaagccggaacttgacctcgatcggctccttcccgccggccatctcccggccagatcgccgccccccacctcctactccccaagatccaagaaaccccggatcagaaatccatagcaccaaacagatcgcaagaaatccacggggccacgccaaagatcgggttttgatgaacaattcttgcttccgtgtgggggttgaaagcgagagggcggcgactcggtgggaggagaggaagagaaggggaggaaggaaggagagaagagacgaaagacgaggagggggcacaggcacactggggcttccttcctcggtaatttaacagatacacccaacgagaagcctcaattattttttccactagcacggagacggagacggagccatccatggttgcgacctgtgaaagtgagaagcaggcggggaattctatgcccgagacgatggaatcaatcgtcggaactgcacgtcggcgacggctggtttgaccgcgtgaacctgcctcatcgttggcgtcttctcccctgtttttctcctgcgccactgctgctgcggctgagctcatgcgcatacattgctactctagctgctggcttcgctggaagtggttgtactggtacaaaagattggtttgattctgaacaaacacacacgcatgatgcatatttttagcagcttggatgagttttgcacgttatttacatctccagtcaggaaaaaaaaagttaatcttaattctttcttcttctgttgacgtcaaaatgactcctcttcctgagttttgaaagggtagcacatgaatggatttaatacagatagtaaatggatttaatacagatagtaaaagattatccttggaggttgaaatggtcggagacggaagcacggagctttttctttaaacgatggtcgttgtcacatgacagttgttgtgaaaatgtggagcaccagacgcaactctttttttctgaaaaatcttgacacgtctcttcatctaaatgtctctggttctcaagcagggtaattactgtttgcactttccggtgataaactggcacctgcaccccattagaggtcatgagtttgtgattagctagtctgagaaggttggctaatactctgacttgctaaccaatacgattagaaattagaattctcctttgacttacggatcaactaacacaattagaaaatagtagaattcccatccatacagcatctgatagttgcatgagacttgcatatggtttgtatattctcagaatctcaggtaacaatccacagacagggataaccaaacgaaggaagcacccaattattcgaggtcagctgctaaacatttcctggcaggcaaagcatctgacagctgaatctttgttaaggctgcatttgtcaggcttactactgtatcttttggtgatttggtcctcggctgaactaggaaacacgattttgcttatgtgcatatgcatacatttacaggagtgaaatctgaaaaaagtccaggctacaccaactatgacaaacctgaaatttcaagcaaaaagggaagacacgacgtggtaaccgcacagctgaacacacggacaaaacggcatacatatgcagtggttgggtttctttgttctatcgtatgatgcaatcaaaaaatggtataattatgattggaggacagcaaagactccggcaatttttgtatatatcacaaatgatttacaaggtcttcccgaaataatggaactgaatcttatacatgtcgctctccaattaatttctatactgatgttgtctcagccaagtactattcccttttcttttggctaaatgccaagtactactattagtttcataagcaacaagaataaaagcatgtacctgcattgctcttatttttataatatataaagaaaaaaagaaatcaaagcaatagtgcacgaatacctgaaaaaataattggtactatggaacaaattgtcacgctcaactttgaattagaacgagccactgcaaagatttccacggtttcaggtagaaaggagctgttttttagtggcaaagaccaccgaagtgtcatatagtggggctctagattccgtactacttgctttcgccaccgcaagcaatgatagaaggatgcagtgcaagcaaagtttgtagaattctcgtggcaaatactaacttacatatatactcacatcatcataaataataataatttttagctacgaatttagacacgatatatatttagattcgtaatcagaattttgtttttttaatggagggtgtaggggtcagtttccaaaccccctcaagctcaatcttatctccggttcctgactagtatgttaatcagcattgaaaacaaattcggtgatggtatattcttatcaatggatgtgacaattaaaatgttaatatatgctacatgcactcacgcagctgagataaaagtaatcacataaagaaggttaccagaagtaatggataatttctatgctcgaattgatacgggggatgacaccaacctacctaattagctggtattctgaatactgctaattggtactcctactataattataatagtctgcatcaagacaccacaacttgtctttatctacccaggagatcaacatctcattcgttttcaactgaaaatcatcacccctgttgtctattatgcaagttggaatctgatccgttacctctgagccttcagaaaagagttttgcagtttgcattacactgaattctgcctcattaactgatgattgggtgtgcatcttaggtgctctactccactaaccatttctcccctttttccctggtataattctttttctttacattccccaatgatttggcagtaaatattgatgctgcaatgctgcgtgatgtttgtctctatcttgcaaatctgcaggtctgttagtggcaaacatgcttgcttagtgtgcctgagatatatgccaaatggccaattattgtttatgctgttatgcacaatcctctctgaaacagcttttttctctgctactagcagtagtggagtcatgggcctactaagtgagagttgaaagctccactacatatgtaatcaatttgcattcatgccggtgtatgagtagattagaatggtagatgcatactctacaagaagaaaacaagatgaaagtgtaacttttcagacaagtggtaaataactatgatagaaaaagtgcaaagaaatagagtacctttgttcatgtactggtttgagcatcagttcacagaggataccagggctgtgagagagactaagactcgagatatttggtgatccaccgccaacgacaagctaacgttgtgtgctgtggcgagcaagtttcgttgtggatgaagaagagggaggttaatggaagatgctttgtgtttctgacgccttgatttgatttgatcgtctctgaatttgacagtgccatgattaggtcggtggtttcggacaactgtcgagttgtggcacaagctcgggtctttttgatgatcgttgccttctcagtagcagggtgaaacgtcggtctaccaactcgtgtttccacatttttatagagtacccgtccattctcttgcgatgaaatgtttgtgtctgaattctgaaatggtagctgtgattgactgaactgaactgaatacctagacgcttgtcacacttcgcagcaactgctttctgtagagttgagattgacagagaccgatccaaatccaacctatcttaaaaaaaaaaagcaaaatttgctaacattcaaaaaatgtgtaattagctgtgaggcaccacaaaaacgtgtatttgctataagacaccacgaaaaactggtaattagctgctggacacctacgggattattttattatatccgaaaaaattggagagagaaagaaccgtgtaagtatggttctacccttcaattttttttctttttgtttttctcaatccttctctactcctttttatttttctttctcttcttcttcctcccgtcatcttcttctctgcctctttccagggaaccgagaggaggtagagaagggcgctggtgctccggtggccgggagacgacgacgctggcggcggagtatgttcccgagtgcggcacaacaagggagggtggtagtaggtcgagggagtgagggaaatggccggaacgacgagtgcaaggccgtgaatcgggaagagagagaggttgggtggatggttcaaagtggtggcaaagggaaaggggaaatggatgaaatggttctactcggcgaggcgaggctaatggtgagaggttatggctggtgaggctccgaggaaggagatcgactggcggctggcttgacacggcatgagagagagagagaggatcggttttgtgtggagaaaagtggagctctgtccatggattggtcgacggcggcgacgctcacacgtggtggctgtggtatggttgggcggcagaggaggaacggcagggcgaggcatcggcgctttgggctgcggcgatggccgctcaaaccacggtgacgacagtggccgcctcctgctcgcactccacgccgccggcctcgcgctccctccctgaccgcgtccgcctccgtgccgtcggccgctcctggcgcgcggtcgccgctacccgctccctcgccgtcgacaacctcgcgccgcggctgctccctgctatttttttgtgtgtgatttcaggtggaggaagatggagccaggggcaatcttgccattttgaaaaatttcccgccttttttgattcggatattataaaatattctctggtgtcctatagccaattacataatttttgtagtgtccatttgccgtgtctcgtttttgcagtgtctcccagccaattacacgttttttgagtgtactgtagcaaattttgccaaaaaaaatgcctcactctagctcaggcccatatactattctgagccggaagttagctatgggctgaagcaatccaatgcatatatagcggaagttagcaaggcctataattaaaagcataagtatataggccatagctaaatactaaagatcagccttacctttctcaccatgcgccgtataccaatcttgccaactactcccttcatcccaaaaaatctcaacctagaactgtgatggaacataacctagtacaacgtatctagatataaagggatataatctagtacaacttatctagacatgctagattatgtcccatcacagttctaggttgagattttttggacggagggagtacgtgcaagcacaggcttcacagccgtccgatccgcctctatccgttccgcagcaatatctaacaaccgaatggacggataagataagctccaacgcagcgtaatcaaataaaaccagatcaggaagcggtggatcgatgacgactgctcggtcgatcgggccggtggcctattaattaggtcggcatcacgggcgccgcgactgtcctcttcctgccatctcggagagtaaagtaaacgcgtcctcctcctcctccgcccccacgtataaattccgcgtcaacccggggctcgcgccgagatcgatcggccgagccagatacaccgatccgatcgatgcccgcgcagagattgccttgccgtgcccgtgaccgtgacagcctcggcctccgatccctcctcgtcgccgatgccgcgggctacggccgcggccgcgtcgtgacgcggacgatcgtcgcggttcaccaggagacgacgacgagctgcaagggggatcagtgcaacggctgcagtgatgatgatgaggaggaggacgtccacgacggcgaggacgggtgctgggtggcgtacgggcgccgggggatgatgcgccggctgccgccgccgctcccgtcgctccggggcgcgatgaggcggacgtgcaccaaagacgggaggctcgtggtcaccgaagcgcccgccggcgccaggcggcgtcacgagtacatccgcgcgcgccgccggggcgggcgcgtgacaatgcagctcgtcgagagcaaggacttctacccgtgtccgtcgccggtggaagaggacgacgacgacgacgacattgtcaatgtcacgcaagcggtcagcgacacgtcgacagcggcggcaaccgtaggagaatgcgatcctggccacatgcagaaggcgccggcgacggcgccacctccgccatcgccgccatccattggatgcttcgaggacgtggtcaagtaccactcgatcgggagcacctcactgcatcagatcgttaggctaagaatggtgcactgagatataaacaagtaggataatttttgtagttaaatttgtacgcgtagggcacgacacgttgtaaatgtacatagtacaccaaatatctgccattagctatacaaaccataaagatttacacacagccaacaaagatttgtttggtccatgtgtataaatgcaggttgattagtcccatgatgggactacctatacatttgtcgacaaatttttctccaaaaatttgatagatgtaattatagtacaatcgtagtgtaattacactgtaacttatatgtaattacactgtaacttgcatgtaactacagtgtaacttatatgtaagtttcacataattttgaatcgttggatctattacaagatttgttttggtgagaaagaaaacaaatcatagcacacacatatgtgaaagaatttgttcccacgacctccattttaccgaaataacatgtaacggagagatttttgaaagttacatacaagttacactatagttacagtgtaattacatgcaagttacagtgtaattacactacgattgtactgtaattacatctgtcaaattttgggggaaaaatttgtcgacaaatatatagcaaaatcgatttgaattatataaggtgcagagctagacgtacgtgcacaaattaacatgataataattaatataataaaacaattttcagctttcatctagctacctggcacgcatatacatgatgcatcaagaagcgtacatgcattgatcaagtattgtatttgagtatttgacatgaagaaacgtgcacgaacacttcccggataaaatataaataaataaatatcttatcctttttatcccctgcaataagactctttattatcgatatcttctttatcttctagaaaatcttcctaggtccttgtatggtgtaacttcataggtctttatatggtgtatagtgtttgggacttttgcacgcataaaaattttcatgtctgaaatgcaaagatctctatccaaaaatgaaaaaaaaagaaataaaaatgatatctgaccattgaccaagaaagattaaatgcgttgaatttagcttttattttcacgggtgcaaatggctgtggcaaccagaaaatagccaggtggccgtcttccccagccagctacccgggaaagcgaaggttttaaatacgtcacagggaaggactcgagccatgattcttgtcaactttcaagctgtgctggcgaatcaatggccacctgcttctccaaagggattcacggagcagcagagtcaattaaaagttctcagaatataagaaaaccttctaatcataacagccctgctaagagcaggtgcaataagctggctatgcgggctgcaaaaatatgccacatcatcttattcctatgtggagggaagagagaatagatgagagagaaggaagcggatgactaatttgtcgtcgggcgatacacttttctcgacgcgctaccgctcgattgcagccggccctggcgataaaaaacgcggtttgtggggcgcacaccacagccgatcccgcaacgctccctctgcttccccatcgacgcatatgcggcgcgcgatctctgtctcctcggcgctcgctcgatctccgcttccctccagcgcgccatctctggatgctgtcaggctaccgacgtgggcggccaggtgcagcggcgtgctcccaggccgggaagcggtgggcacggagacgtcgtccttgtcaaacagcaggtgcacgcatgccgggcggccctgcctggagcgctagagctaggtgcagcagcatggcaccccgcgtccctgacgtagacgaagcgagagaagctccaaaggcagcgacggtccggtccctgcctgggataataatattatgggttaatctagttagttgctatggtatttgagttatctattagtgcttgtagtttccatactacatagaacttggtttatatggtagtggtagtgtttgatgaataaaattcatgtcacaacacaaatggctacagagatataattcactcttgatcctacacattgacatgtgcatgttataattaattacttgattataagatgtagtcatccaatgaacaagttattgtacttatagttggctttaggagtaggctattagccagcagcgggctataccattagccttgctctaatctggtgatctctcggcacaggaacttaagctcatagagcaagtacaataggagaattaagcaggctataatatatccatcatggcaaaaagctgagttggcggagggaatcaaggacagagaacttaagcgggcgactatattaacgccggctgcacgtagcctccaagactaggtgaatttactgtaattggccatacccttgcttacgcatagtgattgggtactagctgttcaggataaatggtgattgaacagcaatcggtttgtgcatgcagcttttggcctgcccaaggaagaaaacgcaagctacatctatatactatatagcctattaaatgacatggtgaattttatagccagcaacgggcggtattattgatcctgctcttatagcaagttcaatagtatagccaactactagctccaattcatctatagccaatctaatagctcattcatacaatagttacatactatactattaatacatagtcccacctatcatagacacactgcgtcttggggtccgtgctacagctgactacaaatctgtagcccgctgctcttctctctcctgatttatctccttaaaatatgtttgcagttggcttatagcttgctattgtacctgctcttacagaattaaacagagcatcactcccgttagcatatgtgctccaataaagaaattttacttgagaaggttaaacagtaggggggtgtttgggagagaggggctaaactttagcccatctcacaaaagcataagtccctctcctagggatatatggactaaagtttagtctctagttcttaaacaccccctaaacactagtacgactactttcatcctgatgaaaaagagagaggactagctttcccaaaagggctgccgttttctgcaccgtccaaatcccagagagaaagaagcccattcggcctaacaaaggcgagagaggaacagggtgtgaaaaaccgccggtaaccgcgcggttaccgcccgtaccgcgggggtacggttacccgtaccgcgcggtacggtttaataaaattcgtccaaatttaaaaatttaaaaaaaaagaaaaaaatcaaaaaaaatagtgaaggtagtgcttgatttatagtgttttatggtgaagaaatttctcaaaaaagagtaatatttattcaaatttgagagcaaaacggagaataaatttgaaaattggaaaaagaaaaaaaaatgggccggcccgttactgtgcaacccattacacatcgcgcggtaaccgcgccaaaccgcgtggttaccgcgtcaaaccgcgcggtaaccgcgccaaaccgcgcggtttgcccgaatttttgaattcaaatttcgatttgtaaatttgtcgcggttttgcgcggttaccgcggttaccgccggtaaccgccgtaccgccgggtggcggtaaccgggcccccggcggtttttgaaaccctggagaggaaagggcgatgagccgaggatgatcaaaggtctctctccctgtagcagcaacacgtgtccttgcaagcagagccatccggcgccgaccggtgtacctttcccaaccaacagcaacaatgcagctgctgcctgcctgcgcgtggggcgaatctcttttcgccccccttttcctttcactttccccgtttcgctccctgattacagctatagcccggactctcgtagacgtggtcatcagcaaaaaaagtcgagtgcacaagcacaaactggtgattaggacttgcacagttgctgcacccatgctaaaacacgccgtctcccgtaaaatcttactactagcacccatgttaggcctaacaacaaagggaccatgttttcctaggctataggagtatgcgtgatgcgtcgtcgcttctgtttttgtgcggcgcgtgttggtcttccgcatcatgagtccatatgaccgagaaaaagaagagttcagcggcatgtgacgctcacctcagctgctgcctcgtacagagcaaacgagggggaacgaagagctagctagcgtgccgagtcttggagagcagcggaagtctttcctggcttggtctttttttccttccattccctctcggtaggctgtgtttagatctaaagtttgaatccaaacttcagtgctttttcatcacatcaacatgtcatacacacataacttttcagtcacatcatctctaatttcaaccaaaatctaaactttgtacggaactaaacacaaccgtaatcaagcagaagccagcgctccgttcttctgcgccgggagctgattttttatatccagggaacgatatattggcaaaaatatgtttgacaggtagcataaggcctcctccaacaaggatgagtcagctagctcataaatttccacatcagcttttgtatgatgtggaagagagagaagataaggagagagaatgcactaactcttcttcaagagctaagctcctaaagaaaatgcgagaggaattgtgaaaccaaaacattttaaacaatgtgctatgagacaatttattagagagttagacttgttgctatcttttatatgaggtggacaagcatatgagctagtacactagctcaaccattaaaggaggcctaagaaacacgggaattgtctaatcggttagctctttttgccatatgatgattggatttggatacacagtgatactagtacggaacatgtcgtgcaatgaaattgacacgttgtttgggagtacaaatacagtggagagtggaactgtggactctagagacaacgtagaaagccaggaatactcaggcatgcgtacatctcgtactattccgtacgttttttttaaaaaaaacgattcgtttatactttgctaaagaatcaatcacacggagtggtattaatcaaacttaaatggactaactcaaataaaaaaaattcgtcgaaatcgaaatacagagcagccttcatttccacagtgagggtgtgtttagttcatgtcaaaaatgaaagtttggttgaaatggtaacgatgtgacggaaaaactaaagtttatgtgtagaaaaattttaatatgatgaaaaagttaaaagtttgaacataaagtttagaactaaacttggtctgattgtggaaccagcaaattcattccaaatggtccttaattgttctaaattttaaaaaagtttatactcagaaatcataggagggaccacgtcactcaacagctggcacaggctgcggccgctcggcacgcctcatcagcatctgcgccgtccatctgggggcccacccaaaaggcaaggcgacgagggggcggcacacgccactaccacgtggggaccaccacgcgcggtgcctcgagtgggctgtggggactctggtcatttggatggaccgttgctgttaaaaactccaattaaacagacttatggaacagcagcaaccgggaccttcatctctcaaatattcctaaaagaacccaagtggttttctttcctccacaccaatcatctacatctactcattgaatacatgatcactctattacaagctagtagaagtatgaatgcttatgtgcacaccgtcggaagtaaacattgtaagcatatataaccatctaactacgtattcgaatgaacggggataaatcctaaaaccttgaacaacacctaccaaaagctcattgccacttttacacaaccatgttattgcaacttaaagtatagcgagttgtttttttaactctattatctctttttatgaggaactctattatctatgttatgaagtggttttataacccataaacattttttagtagcctatactacagcaagggtaaatatgagttgcagccatagctgagacaacgaccaaacaagagatattactcatagttaacatcatcgttctagtagtaacaaagctttaaaaaatcgtggaatggcaggagataaataagtggccttgggaaaaaaaaacaagaatacaagaaaagtagacaaacttcaggtttgttctgtatattgattcaaaacatctattcgaacattaccgtgaaaggtttgctccatatattgtatgttgtcaacttgcattctcaaccttctcttgccaatatcttacttggtcttatttacctgttccttaacttatgtataactacgcagcaaaaaatcatacatacaatttgtaatgtctcgcctctcctataccggacccgcttacatctggcaactttcataggtcatagtctgccctcacagaccaacacaagtcttttctgtacactttgtcctcactcgtgtgcatccggaaagaatttcccggtcggtcacctatcccaaattgttctaggccaagcgtgagtacccagaaagaatttcccggtcggtcactgtcggtgacatgggatcaggagtatcatgactagaggtttgaggcagacacaatcgcacacgtggcctggcacccccgagggacgtcgggcccgagggtgatgtgttcgccctcctcttagtccccccgagggggtcgggccgcacccgcctcggccccgagggccgaggcaccccgacccctcgtgggtttttgatccgcgtgtatgggttaggtgagcacagtggggctcacctaaccacatttattgcggtttggctgagcgtgtcacgccgcatgtaacgcagtgcagtgcactcgtttatccggtctgtgaccagtcacagaccggtcaaatcgcgggttaggtggcgacaggcgatctgacgcacgcctcgccccatcccgtcaggacgagggcttctaggcgctcgtccccagctgaagctagcgtgttacctcccagagatggcacgttagtcctggtcagatatatgccaggcttcatcctaaccattacaggcaagatgttgtgtgaagaagggcgaacatgtagattgctaagctgacacgtggtggacaagaatgaccgacgtgactggtctgacaccggtcatgtcgtcagcagacagccacgattccacgtcgcacctgctcccggcgaaagtggaggtagttgtgggccgtctcatcagaaggtgactcggacggcaactatacaaatctccgtccatttatgaaaaggtggggtaagtccccacaaaaaagagagaaatggtgcatgtggtatccccttaagatataaaaggaggacctagcccactgagagaggggactgatttttccagatagggaacccagaacaagggagcggctggctcatactttgtagctccttcatacacagatctcccaaaacacaggagtagggtattacgcttctcagcggcccgaacctgtatacatcgcccgtgtcttgtgtgtttcctgtctcgcgaaccttccacatacagagagcttagaatctcaccctgagtccccggccgaaccggcaaaggggggcctacgcggtctcccggtgaggagccccgcgctccgtcatctggcgcgccaggtaggggtctctgcgagggattttctgagctctcgcactctttcgtgtgcgccaagcttttcctgttcagcccaatggccgagccggcaaaggcgcacgacctctccccgagtatgagcggtgacgacggggagccaaacccacgccgtcgagctcgtactccaccgccccctccacgccaaagtcctaggcgggagaaggcgctcgagagggccgaaggatccgcgacttcgacgcccacaggaggtggagaagggcggcgagatggggagcgtcgcctcctcgtctacggcgacggcagcacgccccagggcgcgctccaagctgcgggcgcgctcctacgtcacccgcccgtcgcccatgacccggagtctccagcccaacgttggctggacgatgtggccaaattggtcatgactgcacggcagcgcctagatgctggtgggcggtcctccgccaccaaggcctctggtgctgctaccaccggctccgcgtcgtcaagacggagggcgcggcgagcggcagccgctgttcgccattcggccgccactccttcgtcaacgcctccgacccgggaagatctgcgtggggaaccggatgcccgcatcagtatcgagcgccggcgtaatggccgacgtgctccccacgcaacggagggcgcctcctcgtccggagtgtcacctcaccacggacgcggggatcagccctccgtgcccccggttggtggtgtcggctgtagagcctttgtggcgagccttcggaatgtccgttggcccccaaggttccggcccaccatcgccgaaaaatatgacgggagcgtcaaccccgccgagtttctccaggtctacacgaccgggatcgaggccgccgggggtgacgacagggtcatggcgaatttctttcccatggccctgaaaggacaggcgcggggttggctaatgaacttgccacccgcgtctgtccactcttgggaggatttgtgccaacagttcaccatgaacttccaaggcacatatccgcgcccaggtgaggaagcggacttgcacgcagtacagcgaagggatgatgagtcacttcgctcgtacattcagcggttctgtcaagtccgcaacaccataccatgcatccctgcacacgcggtgatttacgcgttcagggggggtgtgcggcacaaccgcatgctcgaaaagatcgcctccaaagagccccagactaccgcggagctttttcagctcgcggaccgagtggctcgtaaggaggaggcatggacctggaacccctccggttccggtgtggcagcttcggccgcccccggatccgccgctcagatagggcggcgtgacaggaggaggaagaagaggtcagcccataccgacgacgagggtcatgtcctcgccgtcgagggcgcttcgcgggccacccgaaaggggaggcctgcgggaggcaaaaagaacgaggccggcgctcccaacagggagcgcccaaccggcaagtggtgcaccgtccacaacacttcccttcacgacctcgcggactgccgtgcagtcaaaagtttggctgagcagacgaggaagtgggaggaggagaggaggcaggagcgccgagagggcaaatccccggcgtttccttccggtaatcggcgaagtgaggccaagcagaaggccctcgccgaggacatcgatgacggcgatgatgacctaggtttccaagagcctggggccaccattgccaccgtcgatgggggagcgtgtgctcacgtttctcgccggagcttcaaggccatgaagcgagagcttctggccgcggcccctactcatgaggcgacgtgtcgggcgcggtggtcggaggttgccctcaccttcgaccagaccgaccacccaccgtgcgttgcccggggagggcagattgcgatggtggtttctcccaccgtttgcaacgtgaagtaggggcgtgtcctcattgatgggggagcggccctcaacatcctttcccctgcggcctttgacgccatcaaggccccggggatggtgctccggccgtcccagccaattatcggtgtgacgccggggcacacgtggccgttaggtcacatcgacctaccggtcaccttcggtggatccgccaacttccgcacggagcgggtgaacttcgatgtggcggacctcagtctgccctacaacgcggtcctagggaggcccgcgttggtgaagttcatggcggcggtccactacgcctacctacagatgaagatgccgggccgcggtggccccatctctgtccatggcgacctcaaagtcgcgctcgcttgtctggagcagcgcgcggaccacctcgccgctgcgtacaagcccgagggtggcgacgagaggcttggcgcctccgcccccgccaccccgaggcagcggatgatcacaggcgacgaggtcccggtcaaggaggttgccctgggcgacggcccgtccaagaccacacggatcggtggtcttctggacggcaaataggaagacgcgctcgtctccttcctgcgggcaaacgctgacgtcttcgcatggagaccggtggatatgcccggggtccccagggaggtgattgagcaccgtctcgccgtgcggccgggcgcaaggccggtccggcagaaagtgcggcggcaggccccggaacgtcaagccttcatccgcgaggaggtggcgcgacttctggaggccggattcatccgtgaggtcttccatccagagtggctggcgaacccggtggtcgttcccaaggcgaacggcaagcttcggatgtgcatcgactacaccgaccttaacaaggcatgtcctaaggatccttaccccctgcctcgcatagatcagattgtcgactccactgcggggtgcgaccttttgtgttttctagatgcatactctggttaccatcagattcgcatggctagggaggatgaggaaaaaactacgttcattacccccataggaacctattgttatacgacaatgcccttcgggttaaagaatgcaggtcctacttttcaacgtactactcgaatttctttgggtagccaattaggacgtaatgttgaggcttatgtcgatgacttggttgtaaagacgcgcaaccaggaaacgttactctcagatctagcggaaacttttgagagtctccgctccgcccgcataaaactaaaccccgataagtgtgtgttcggtgtacctgcgggcaagcttctcgggttcttggtctctgcccgaggcattgaggccaaccccgagaagatacgggctatagagcggatgcgccccccagcaaacttagggatgtgcaatgcgtcaccggttgcatggccgccctaagtcggttcatatcgaggctgggagagaaggcgttacccttatttaagcttctcaaacgctccggaccgtttacctggacggaggaagccgaaaatgccctcacccagttgaaggcatgtctaagctctccccagttctggtcgccccggagccagacgagcccttgttactctacttagcggcgaccccgcaagtagttagtgcggcattggttgtggagcgcgatgaggacaattctcatttcacgcctccccaccctgtgccgacttggcccgggagagagcagggaggagaggctcccgagccgaacggtggcccagggcccccgacgaccggagttggccctctgcccgcttgtcagacggtgctaggagcccccgacccccaggaaggccctgaggccactgtgggaaggccgcacctatcgccctttgaccccgaggctaaccctgtgctgactcgacccgggaaagagcagggagaagaggcccccgagccgaacggaggcctaaggcccctgacgaccggagttggccctttgcccgcttgtccgacgacgccaggagcccccgacccccaggacggccccgaagccactgtgggaaggcggcccttgttatcctccgactccgaggtcatcagcacagaagacaagtgcgccccgcgaggctgcttggacgaagagtgccccagggatgcggcccctagcgaagaggatcggccccaccgaaaggtgcagcggcccgtctactttgttagtgaggccctccgggacgccaaaacccgataccctcaggcccagaagatgctttacgctattctgatggcctcgaggaaactgcgccattatttccaggcgcatcgggtcacagtagttacgtcttaccccctcggtcaaatcttgcataatcgagagggtacaggacgggtggtgaaatgggcaatcgaactttctgagttcgatttgcactttgaaccacgccacgctatcaagagccaggccctcgccgattttgtggcagagtggaccccggctcccgagcccgtctcgatccccgaggccagcacggacccctcgcagctgcctcacaccacccactgggtgatgcagttcgacggctccctgtctcttcagggcgccggtgcgggggtcacgttgacctctccgagcggagacgtcctcagatacttggtccgcctcgactttcgagcgaccaataatatggcagaatacgagggactccttgccggactaagagtggcagctggactggggatccgccgcctcctggtgttaggcgactcccagctggtcgttaaccaagtctgtaaggagtaccggtgctctgacccgcagatggacgcctacgtgcgccaagtacggcgtatggagcgccattttgacgggattgagcttcggcatgtgcccagacgggataacatgattgccgacgaactctcacggctcgcgtcctcgcgagcccagaccccaccgggcgcctttgaagaaaggcttgcccagccgtcggcgcgacccgaccccttaggggagacggatgcgcctgaccggcccccgaggcccgtcggagtccaggcctcgggacccgaggggagtgctcccaactcccttagattgattgcttggatcgccgagatccaagcatacctcacagataagactctacccgaggaccgcgaagggagtgaacgcgtccatcgcatctccaaacgctacgtgctggtagaagggaccctctatcggcgcgcggctaatggaatcctcctgaagtgcattcctcgggaacaaggcgttgtgcttcttgccgatatccatgaaggcgaatgcggagcccactccgcctcgcgcaccttggttggtaaagcttttcgccagggtttctattggccgacagctcttaatgatgcggtcgacctggtccggcgatgtagagcgtgtcaattccacgccaagcaaatccatcagccggcctaggccctgcagaccataccactttcgtggccgtttgctgtctggggactcgatatcctgggaccatttaggcgggccccgggcgggtttgagtatctgtatgtcgcgatcgacaggttcactaagtggctcgaggcttatccggtcgtcaagatcgataagcactccgcacttaaattcattaagggcatcacggcccggtttggagtgcctaaccgtattattacggataatggcacccaattcactagtgaactcttcggcgactactgcgaagacatgggcatcaaactctgcttcgcctcacctgcccaccccagaagcaatggccaagtggagcgcgccaatgcggaaatcctcaaaggccttaaaaccaagaccttcaacatactcaagaagcacggcgattcatggatcgaggagttgccagcagtgctctgggcaaaccgaactacaccaagccgagcaaccggggaaacgcctttcttcctcgtctacggcgcggaagcggttctcccatccgagctcactctgaggtctcctcgggctaccatgtattgcgaggctgatcaagatcagcttcgcagagatgacctcgactacttggaagagcgaaggcggcgcgcggccctccgagccgcgcgctaccagcagagcctgcggcgctaccatcagcgtcacgtccgggcccgatcactctgcgtcgacgacctcgtcctaggccgcgtccaaacgcgtgctggattgagcaagctttcaccaatgtgggagggtccgtatcgagtggtcggcgtcccccggccgggctccatacggctggccacgggcgacggcactgagctgcctaacccgtggaacatcgaacaccctcgtcgcttctacccctgaggggggggtcgggtgtcaggtttcgggctcgggccaaccccgcaccccctcgggcgtgtagggttggccgggggctgccacacatgcacattcttatttcttttttttcagtacttcaataaaagcagtttcaatttcctaaaggctgtatctgtgctgttttttccttttgaaaaatcttgacttgaaataggtcactcgtgctcaatcctgccctcgggggctcgggtcggctaaaatcgccaaacggggcccagaaccgagccgtgccccgaggcgtggtgaactccgggggggaatcggcaaaaacccacaatcgggtcacccataaccctcggtcaccacgttcccggcctggccagtctcgacatgtggatctccccagacactagccccgacccgcgccttttgaggaccagaacctgggcacaagcccttattcaagctaagacacaaaaggaccacggcacagatcatcctcatctcatactcacagcaagatgaaattaacacaaaaatttcttcatttttgattacagattcagttgatctataaaaaaagaggcccgaaggccttagaagaaagaaaagaagaaaaaactgaagaatggcgggggtctgggggctcaatccgatgcgcccggatcgccgtcctcgtcgtcactgtcgtctgcaccaccggcattgccctcctcgtcggagttgggggcgaacgcgagccgaggggccgagccctcgaagctgtcgacgatatgatcggcggcatcccggacctgcgcgcgtgcgcggtcctcggtcccaggagggaactcatccagcgccatccatggagagaaattggggtccctggcctggtaactcgccaggacgagctccaccgctccttgggcgaggtccctcgaggatgacttaattgtcttctcgagctcctcggggagccgttggagagccccggccatcttcgagaggcgctgggcgaggcctccctggttggcggcatactttacggtccgccctctccagaggcccatttgccgaccggcgcgatctaggcgggagacggcgtcccaaagcatgccgggccctacctcgcctgccaagcggagggcttcgacctccccggcggacgagtccagcgcgccctgcagatcggcgatggtgcgttcggcagctgcgaggcgggcggctaagtcgctttcgcccgtggccgccccgccgctgcgcgccctcacgtccagctccttcgcccgcgcctcgagctcagcggcccgttggttcagtacggccctctcggcgcgggcaccttccagattgcggcgcgcctgctcctcctgcgctgcctcgcggagggacaggctgaccgccagctgttgcgccgcggcctcggccccctcgagagctcgctcccgctcggtgagcgcgtcctcgcggaggcggagcgtgaactcttcttcggcgcaggcagcctcgtgcgccgccagcgttgcttcccggatggtgacggcggccttgcggtccgccagatccctctccacgacgcaggcgcgctcttccagcgccatggcgcgcgcctcaagggcctcttcacaccgccgggacgccgcttcggtctccgccgcccgctgttctcgggcagcgacagcgtcaagcaccccctgggcggcgtcgagcttcttccctagctccgcctcccagctcccgtattgaaggcggagggtgtcctgcgcctcgttcatcacggtggtggcaatgagggcagccccccgctcctcctccacttccttggcgatctccgccagcaccttcttacgagtttcaagctccgagacgtgtcggcggtgagccttacggcccacctccaccatggcctccaccgagcgtcgcccctcttcgacacgcgcccacgcggcgtcgagctccgcccgctctgcctgcaggacctccacctgggcacttaacccatccaacaccgtggtgtttgcggcggccaaggcctgcagaaggggctctgcgttcagtggggcgatagaaggcgtagggaagagccgccttggagaggatgccacgcggctcgggccgccgatggaagtgccggactcggggatgtcccccggacccgtttggtcctgagcgtcgcccgagggagtgggcccaagcgacgcgcccgcagcctcgtcgccagctgccccggaagttgtcgcctgagcgtcgcccgagggagtgggcccaagcgacgcgcccgcggcctcgtcacgagctgcctcggaagtcgccatcgcctcgtcctggcgaaatccggcctcctcccgagcggcttccccggcctggcgggcccgggcggcctcctcccgagcggtttcctcggcctggcgagcccgggcggcctcctgggcggcctcctcggcttcccgtaggcgatccgcggcctcttgccggtcagattcccgcctgagggcctctgcggccgccggatcctcggcctcagactggccggacttggaatggcgggagggacgcgacgggatctcgctgaaacaaaagaaaaaaccagaagacgaacaaggtgggtgagtgaaaactcgcgttgagagaatgaatacagccacgatgggtgagagacgaacctgcgaggaggtcggttaaacgaccactttggaggggaaatgaggttttccccgagatggttctgtctcccccatcttacggggccgcttcttcttgcgctccccctcgggctgcgatgttggcgcggccccctccgggcgcctgctgctggcacgcgccgccccgccccctcggggaggagatgggggaggtgttcctccctgcttcctcttcccccgcgcgtcggcagggcggctgctccccgggcccctgtcgcgggacccagaagcacgaccccctctcggggtagattgttcccccctgcggctcccgcccgcgccgtcgtggccctttggagctcgctcctctgaggccccaaccgccatcataatggtcaggatggaggcgcggtctggatcgctgcagaggggaaggattccttggggaatgagggccgcctctacggagttgagattcagcacccgttggaccaatatcttgaagtcctcatgagcccagtcccatctcactccctggtgggtcctcgtgaagtcttcggacccggtgtactcccaggcgccccgagcgcgtcgctggagcggcgcaatccgacgacggaagtagtcgccgtacaccatggcccctgtgagcccctgggatcgcaggcccgccaggcggtcgaggacggcgtcatagccatcccccagatctaccggcgcccgccagctggaggcctgcgccgggggctggctcggaagtcggaggcgcgcttcgtcggcgaggggagtgtagaaccagtcgctcttccagtcgtcccacttcttgcggagggcgcaggggatgtagcggttcagcaccggcccccgtggctggaagtagcagccaccgactaccgatggcggcgacaccgactgcacggtgaagaaccaccggaacagccgaagagatgggcgcaccccaatgaacatctcgcacagatgcgcgaagatggccaatgtcatcaccgcgttgggggtgaggtgcgccatctggagatcgtagaactccagaacatccatgaagaaagaagaaaatggcggaaccagccctgccattgcaaaggggagaaagaagacggaccgccccgggtagtctggcgccgggcgtccctcgcccagcgtgactatctcccggccggtggcagattccggcatgaagcggcgtgacagcccagcctgcctctcgctcacgatgcgggaaggcggcagcacgctaccatcgagcagagcagagccccgtgccatggcgccggaggaagagaagattaagagcgagcgcgtgtggcgaaggtagggcacaggaaagaaggagttagggcgcaagcggcgaagacaaggggaataatggcgaaaggaaggaaacagatcccttcctcagtgcctttatactcttgccaacgctgtgcccggctcctcgcttctcgcgcccactatttcgcccccttgtttttcgcgcccacgcttccactaatcccattcgcccgcttgcggcgcatgaggtggatatgcggttgtggcagtcgagatagatcatatcgtgcgcgcgttaattacgctcgccgaccgaagcgacgttaccatatctccagacgaaacgaatcgccatgtcaagattcgtgtgctactcaagtaatgtggcagtcttgaagagactgctcattgttgacagccgagttaccattgccgatgtgcgtggtttgtgaccgttgggtttctgcccaattgtggagaccggtcccacctgtcaccaggccttaggagtggcgtcacgcccgaccgtttcccttaaagagggcgatcgccctggcttaacgccgggggctactgtcggtgacatgggatcaggagtatcatgactagaggtttgaggcagacacaatcgcacacgtggcctggcacccccgagggacgtcgggcccgagggtgatgtgttcgccctcctcttagtccccccgagggggtcgggccgcacccgcctcggccccgagggccgaggcaccccgacccctcgtgggtttttgatccgcgtgtatgggttaggtgagcacagtggggctcacctaaccacatttattgcggtttggctgagcgtgtcacgccgcatgtaacgcagtgcagtgcactcgtttatccggtctgtgaccagtcacagaccggtcaaatcgcgggttaggtggcgacaggcgatctgacgcacgcctcgccccatcccgtcaggacaagggcttctaggcgctcgtccccagctggagctagcgtgttacctcccagagatggcacgttagtcctggtcagatatatgccaggcttcatcctaaccattacaggcaagatgttgtgtgaagaagggcgaacatgtagattgctaagctgacacgtggtggacaagaatgaccgacgtgactggtctgacaccggtcatgtcgtcagcagacagccacgattccacgtcgcacctgctcccggcgaaagtggaggtagttgtgggccgtctcatcagaaggtgactcggacggcaactatacaaatctccgtccatttatgaaaaggtggggtaagtccccacaaaaaagagagaaatggtgcatgtggtatccccttaagatataaaaggaggacctagcccactgagagaggggactgatttttccagatagggaacccagaacaagggagcggctggctcatactttgtagctccttcatacacagatctcccaaaacacaggagtagggtattacgcttctcagcggcccgaacctgtatacatcgcccgtgtcttgtgtgtttcctgtctcgcgaaccttccacatacagagagcttagaatctcaccctgagtccccggccgaaccggcaaaggggggcctacgcggtctcccggtgaggagccccacgctccgtcagtcacctatcccaaattgctccaggccaagcacgcttaatcctggagttctttggagatcggcttccggaaaagaagttgcaacttgttgatatgagtattctattaattctattaagccataggctgggatgttacacaattctagaaaaaaaaagtataggatacatatgaaaactattgttcaaactttaggtgcattttgtatattcaataaagaaactggttttagcgttttccaaagctagagtaggtttgctcttcattttttttaaaaaaaatgtaggtttgttccggtgtacactcacaacttgcattcccaaatatcaaccttttgtcactacattggagatctggaatatatgaaattctaaacgaaaatgttgaaattaaggaaaatgtttgggtagtaaaagtagacatatcacatatggaagttctacaagggctaggtggcaaaaccgccaaaaaccttgtccgccgtcgtcttttttgcgcaaacttccacaccaccacgccatcaccacctccacaccgcccttgccccctcgctcttcttttcttcttcttcttcttcttcttccccctgacgctctcactcccacccgctcgaccaccaccaccgcctcctcctcctcacctcgcaccccgcaaaacctagccccaggtcctctcctcccctccgccttgccgcattacccccagatccaccgcctccggcccagatccacccatgcgcctcccggtgctactcccgctgctgctgctgctgctcgccgcggcagcggcggtggcggcggcggaagcggcgacgctttcggcgaggatggtgcaccggctgtccgacgaggctcggctcgcggcgggcgcgcgtggggggcggcgctggccccgtcgcgggagcggggattacttccgcgcgctggtgcggagcgacctccagcggcagaagcggcgggtcggcggcaagtaccagctcctctccctctcccagggcggcagtatcttcccctccggcaacgacttgggctggtgagctacacttcctgcctgggctacggtctcgcccctctagcccccttcggatcttactgcatttcttcctcagcatttttaatcttctgttgtactgtagatgcagtagcatctcttcgcaagttcacatgctgtagtagttcagttacttcagtagtgctataggacagccgatatagaacaatgcgctactattttatcacaaacttttgtagtatttctcgttgtgtagtatgggttacattgtgaatttgtgatgggccaagcagccttgtgcagagtcagtcgtgcttaggttgcgctctgagttgtggagtttcttctgtctttggatggatgtgcaggttatactacacttgggtggacgttgggacgccaaatacttccttcctggtcgcattggatactggaagtgacttgttttgggtgccttgtgattgtatccaatgtgcgccattgtccagctaccatggaagtttggtatgcatctctttgtgatcagtaacgtcatgttaaggatataccgatgctctatatggggatgttcgtggcaatgttaacagattatcaaatttgtttcctaagaaattatttcttcgcggagggtctgtttagattggtgtcattttaaaccataccattattcggtaaaattaacaatcatatgtctgcatttagttttctaccaaacattggtaatatctagagaattttggcaatatcacatttaatccatataaaaaacttggcaatgttgtcaacttgctaaaattttggtattgtcaaattttagaatggtttattttggcagcaagctgaacatgcctggaatatacaccacaggtctatgaagtcttaataagtaaaacatgcaatcattacatgaatttgaacaagcaattcagtagcatatatgtttcgctattacttttattgattcttgtaattattctgccagacctgtgaacatgcaaattatattacttagctcaatttcactcttaatttatctaaatttgctgatgttggaaatataagtacaaatctaatgctgatcataaattattgaacatttcaatagatcagtctagtaggttaggtacccactaaatagagactaggtggcaactaggtgggtctaagtggtgactagactgggggatgttgctggcgactagccgttagttgcagcctaggcagccgtcctggtgaactctgcaataaatacaatgcaaataagtttcagaccaagatgcagtagctgttttggcactctcaggtcaggtaaaactaattttccccatattgtccactcagatgataaaaaacaatttagactgcaatttttagctaagaggcaagtttagggaatactccctccatccacaaaagttagacatatttcacatttgagcttttccaaataagttgttcctatttgtagtctttatgcatccaagacttaaatgaatagataaattaaatgtttgattagaacccaaagagttatctaaatactcattggttgcatgcttgcattcactccttgattttgtaacatgcaaggtgatttaatttctccttggtcttgatgacaaaagtaatatgtgtaacttttgtggatggagggagtaacacttagttacgggattgcaggtctacgaagttgatcttcaagtttaggaacccaaatggcagtttgttagaggttacttagtttgttaattctaaatttcttatgatgctaagtagtatatatgaagcacacaaacaagaggaatttgttttatattttaaagcaggtttagcacttatttggaataattgattggcaggtgctccgtcatatgtggagcatctattatgcaggatagagatcttgggatttacaagccatctgaatcaactacaagtcggcatctgccctgtagccatgagctttgctcaccggcttcaggttgcacaaacccgaagcagccttgtccatacaatattgactacttttcagaaaatacaaccagctccggtttgctaattgaggatatgttacacttggattctagggagggccatgcacctgtgaatgcttctgtcattatagggtatgcttctttgtcttctgcccttttttttaacattaactattgctggagcaataataattatcagattgcttatttcctactagggcattctaattgaacaacaatacaatcacctgcgcgcatggccgcatgtttacttgtacatttactgatatgtcaggtagcagcatgcatctgcatatagaatgaaataattccatttttaaacccctaaactttgccgaatgttcaattgacactcaactataaaatcatttaaccctaaagttagaaagcaaggtgagcttactccctaaggtggtctcagtgggtgcttttgacattgctgttaacatggaaaataactctactgatccaccttccaaaagaaccatgcttgccttaggccttgtgtacataggtggcggttaggccctatcctttccgtctttaaactagaagtgttaattacctttataatattatctcgtggcattatcgatacaacaagtcatgaatgtactcctagaacaaaaatgatacaaactagatgttgtgctctagtatgaaacacctctagtttaatgattagtttgcttaatgaaatttacaacttcattaacatagtgtgtatccctgtgtacagctgtggtaaaaagcagagtggtagctatttggaaggtattgcaccagatggacttcttggtcttggaatggcagatatctcagtacctagtttccttgcaagagctggattagtacgaaattccttttcaatgtgtttcaagaaagatgattctgggagaattttctttggtgatcaaggagtacctacccaacagtctacaccatttgtcccgatgaatggcaagctgtgagtaccccacaggaatagatatgtgtagcaataccattagtttctattctctattttatgttatccattttgggggggtcaagccatgtccactttatattggaagcaatggatgtacttcttgacagttccactcacatgctttctcctttttttttcagtcagacttatgctgttaatgttgacaaatattgtattggacataagtgtacggagggagctggcttccaggcattagtagacactggaacatccttcaccagtcttcccctcgatgcctacaagagtatcactatggaggtaaatatctactccttcggaggaattcttttggtggatatcgcctgtgcttatttatcatgaattcatgattctgcagttcgacaaacaaatcaatgcatcaagagcatcttctgatgattattctttcgaatattgctacagcaccgggtaattttattttgaaataattgcttctgttccatttttgtgagtaatatcagacaagctaacctagcccaaaaacaaaaaatcaaacaagttaagatggtgcaaccacttagtttctgccacttctgattttatgagttgtttgttgcagtcctcttgagatgcctgatgttccaactataactctgacttttgctgagaacaagagtttccaggctgttaatcctatacttccatttaatgacagacaggtatgtacttgagttgtaaaaaaatatcaggcactagcaccaaaaacagtcagttaagggtcatattgagtcatgttgtgtattgtgatctatgcttagaaattccaagtgtcttcttttccgctacactttatttctcaagtccgtgctcttgactcttgagtcttggaactcatatctggcttcatttagcttctttcataatcaaaaatagatatatatagggccatccaagctagctggaagtacattcttttcttctaaacatatatgtccacccgcacagttgttaaatactcgtgttcccatttgatatagcattatgaatcttatagacatggctcagtggttttgactgttgtgctgggagtaaaatgctaatcgttactacactctgttatttcataaataggtttaaatagggtatcaatgccgaaattccttttaaagtttttttgggcaaaatggcatgtatgaatatgacgcttaatgatttctactagaatactactactgaaattttaggatttcctaggttcatttttttgaacttagtaattttgtccttgttgcatctgcatgctacacatattgaactcccatgatttgttattccaccgccaagggtttgacaaaaccaaactctagtaagaattaccagtagaaacccatgttacatttggagctgacaccttaggtatgatgattagtgcatcaactcatacaaaattaaaaccgtaggttattagctggatgttgatgttgtcttgttttatttatttttacagggagaatttgctgtcttttgcttagcagtactaccatcacctgaacctgttgggattattgggcgtgagtacttatatttatattgaaaaatcaattgtttttggtattttatgttctcttacgagacaatactatcgaatgcagagaatttcatggttggctatcacgtagtttttgacagagaaaatatgaagctgggctggtaccgctctgaatgtaagccagaaccatgccacaataaataccacaaaacttctaactacgacgttaatacgttgctgatcatcgtgatttgcaggccatgatcttgacaacagcacgacggtgtccttaggtccatcacagcataacagtccagaggaccccctaccgtcaaacgagcagcagacctctccggctgtcacgccggctgtcgcaggcagggctccgtcctctggcggatcgacgactctgcagaacctacttgctaactctaacatgctgctcttactgactatgtccgtgttcttcatctcatgaacaactcgctgacaatgatctaacttatagtagctctgtaaattgtatgtgcctcgtatatgcctatatggtgtctttttgttgcttagagagctcagtaaatcagcagctgcatgcttctgggtgccgtgccgataagtcgtttcctgcgtgcactgcgtgcagctgtatgtaagtatatgtgtcgtgcatccatgtgcattggagcatgcgtatgagctgatcaccatggcacatacatggtgatcaaaatgagctgatcgtctttgtctccgtctactgtacacaaaatgagcgtatccctgtagtgataacgctgatgggcgaagaatccccttttgcgagagctgcagtgcagcgtgcagccttgcagcaggcggtttcttgcggccctggttttggcctactgcaacacaccaccccggcacagaaccaccgtgccacatccactgtacacacctcccccttcctctccgtgcctctctccacaccaccacacccctctcctgtcccttcgcaccgcgcattcgccattgccattgccattgcctccttcaccatcgagcccctcatcggtctctttgatttggtgtgttattagctctctgctctctccatggggggaagcataaagcggctgcttagcatgttgttgagcgcggtcagtggtgggcagagggacaaggggaagaggatgcagcggcggcggcagcagcagcagcagctacagatcacagtggagctcagggtcaggatggactgcgagcgctgcgagcgtcaggtcaggagagccctcgccggcatgagaggttagtcctccgtccatccgtccgtccggttggtcgtctacctgctggccctacgcatactatgccccccattgttttctctgctcgctagcattgtgcccagggccttgcttttccatgtccctcggctcctcctgcgtaatgaccatcgttgtcatgtctgcttaagcttttcccagcacactttctgcgaacaaatgcatcatcaatactgtcagacgagcaggttgcgttgcacctttcttttcagcaattcttggcccccaaacacgaatccgttgcaaatgcataataacacaacaatcctagttcttgattatggagagggcattgcatttacaaggtcatttgtgaagctgcaggggtgcagcatgtggaggtgagcaggaggcagcagaaggtgaccgtcactggcagcgtggacccacacgaggtcctgcgcagggtccagtccacggggaagaaggccgaactatggccccagtaccctacctacggcagcgccgccgccgccgccgccgccgtggtccactgcggcctcggaccaccgcacgacaggtgggcacccgcttgccacccgaggaacatggacgccgccatgggcgccgagcacatcgccaacttgttcagcgatgacaaccccaacgcctgctcgctcatgtgacgcctacaccacctactgtccgtcagcattgtgctccatcatacagttgggttcacttcactctagtttgttactactctttattagatagtagtaggagatcaccaggctgtgcttatttgaggtctagattagcttccagtagtgtgtgcggcagtaagctagcgatatgggccaaactttaagaggttttaattactacttgtatggtgctacagaatgggccaaagtttagatgaaaacttcctctgaattttaatctcagcctgagacatagcttgaaacattgtgtgacacatcacagtggggatttcagaaaatctagagcgtcattcaggttagaaagcttggccggatatttaagcagtatctaccaagctggttgacatcgagccaacgatattttgttctttgcatcgctcactggtaaatcttttgaagttttatctgatattacaatgtaatgggacatgagaaattgagagcttagaaaaggtaggagaggtcagcatctctcgccctcacttttcgttcaaaactgcctccaaaagcaggtcgatcgatgatcattaagatatctgaaaactttagtacgtcatgcagttcaactttcctctctctactctgccaaattattattatgttctcaggcaaagcagtccaagagtaatggagttgagtgcacgatgacaccatcagatacacggggagaaactaaaaaaaagggggtcgcagatgctgaggtgaaaccggcttttgcaccagtgcaaagcccctccttttttgagctcatatctgttcttctagattgctgtgttcctggtgcgtgcagacgtctgcatctttttgcggtcttgcaaggtcgttcgtagcaatggcttttgggcgaggtgggttggcaacagctgaactctcgccggaccactgctattcgtgcggtctcgttttctgaacttgcccgatgggatgctcaattgctcatgcttgtagccgcttcgcttcagaagttcaattgcgaaactaaatgctagtactaacatgttggctaccataactagagtatgcgagtccataatatcaagaataatctatgtgatttttgaaaacattatttcagatgatctttttattagcggaagtgggggtttgtcttatcacgtttttttaactcctttcatttttacttgtgagatttgttggttatgtgcccatggacaaaggccgtagatgtaatatattttcattatctaaaaaaagaaagaacagtccgaagcctgttggtacagtttagacggcaccgagctgggcgcgatggatcgtcctgtgttctttttcttccccggtaaaaaagtgtaggagtacttgttgatagtggaaactaagacatcacccactttaaattcacacagcattactactgtttgtctgtttctgcgttagatgaaccaaaaagtggaacagaaccgggcagcaaagaccaatttatgtagctactgcgtgtgtatggctgcttagtcatgtatacaggtccgtccgggacaccaacgcggaagtaacgtctttcatgcacgctagcacccaaggtccccaatcccccacacccaacccatgtgtcagtcagcgtgcaggtgcagcgcatcgcgcgcgacgcgccaccgagcgagcgagacgtacgtacgtcacggtgcgcggtcgtgatcagtggccgcattgccgctgcccccgcacgcgagccacgtacgcgctggctgccgccataatacgaggtgtgtgtgcctgcctgcctgcgcgcgcgggccgcgagagcgacggtgagcgcgacgtacgggtttggcatgtttcctgccgctgcccgcggccaccacctcgtccgatcagctcggtcgcatatgccaacgacgactcctcgcgacgacgcgatctgtctcccatcccaccggttgcgcggttgcgctcgatcgatcgcgaaacgcgcgatagatactggcgccaatgcgccatcgatcgcggtcgaggcccacgagggtttttttccctcccctccccaaccgcgcgcgcggccgtctcgttagtttcggagattcgccgtgccacagtactgccaaggttggtgggcgcgctgatacactgtacttactcacctatacgtgtgcttcctcgtgatctgcctcgcgttgctggtgacccgtggccccgcggcgggggagtacgtcggacgggccggttttttttttttttctgaggatatggtggtggctgtcgtccgaggcgggggtttaatttgtcgagctcgaacagaaacccacaaaagtgcacgcatgcatgtgatgaggggagcttctgttgcagtcacatattttgtcacacgcgagtgatattttggtgctgtctccaaccaacacctgatatgaatgtggcatcttaattactagatgattgaatacaagcgcgtaggcaaatgtggatatgtatgtctcgttgtaaatggtagagcatatcatggaagtgattccaaacaagagcgcatgaaataagtttggacttatctttttctaggttgtttcaacttataagggattccatgtatttgggatttataattaaggtcaagttcattacattttccttaaaaaaaatcattccacattacttacgttacatgtgtaatgtgttcgatgagtaatttcccgataatttatgcattatcagccttcttttttaaaaaaaaatagttgtgcttggcacaacaaaatgcacggattattttacagggctgcaagctaaggtaggttgataaccttaatacataggagtagtttcttcgaagtcctccatcttaaaattatactccccttcatctcataatataaggtatttcgtcttttaaatttgttctaaaatataaaatattttagaattacgagacaatattttattctccacctaccaacatttatactactttagtcccccaccatttacttttatactagtttatttcattatctactaacttttctactattctattctttcacctatcaccgttcgtacacaccatcacatattctttcactacttccttgatttttactaaaaatggtatatttttttatattatgagaggttatagtagtttattataggattagacatatcatagtcttataaatctagatagggattaggcatattctaatattacgaatctaaatggtttttatttagaacacaaattaaaaacatgtaatgcgaatccaaacaatattagctaaaatactcttattcccggatcaacatagataaactcgtgtcgtgagtttattcggctagaaaggcacacatatattaactactccattcgttttatattataaaactttctggcattgctcacgttcatataggtgttaatgaatttatacacatatatatctagatttattaatatctatatgaatgtggacaatgttagaaagtcttataatataaaacggaggaaatatttatggacaatgttagaaattcttataatatgaaatggaggaagtatttatacagctgcatgctcgcatgccacaaatcgttgtaatgaattatgtaactttaaatacacatagtacattgataagattaactaagatagttacgtgtaattctcttgcgtgttcgcgaaatacattgatgagattaaaagtagtcacacgaatggcgatggcgccatcttttggtacctctaatactgtcgtccggttgaatttttcgtgtattctctttcggcatacatgtatcaaaaaatagacccgcggaattccagccgaattctccatgtcttctatttcaccatacacgtagctcaaaacggacacacagaaatcgcgtaagcgtttttttgtcttgtttaagggcgggcgcaagaggggccgggtaagcctagcaaaagcgcctttttaatcgtccgtccgttgcaagtcatcagctgcagcctcggccgcatcacatctgagccgtcgaagagattccagaagaggggagcggacggcccagatcgcgcagccacattcccctcggcctctttttatgcccctccccccctccgctcctcccgtcctcccccaaaaccccccctccccaccatccagtctccttctctctctccacatctcgggacaagaaagccatcgaatccgagatcgccgggcggggagtgaggtaagcgggagcccatgtctgggaagatgctggggaagcggcagaggagccaggggaccatgcaccggacgaccagcatggcgtcggtgccggcggcggcgaagcaggggcggcgccatgtggtggaagggccaccacgggcgccgcccgcctccctgctcgctggaggaggccccgccaccgccgccgccgccgaccacggcggagtcgagacggcggcgttcttgaagaactgcgccctgtgcggccgcgacctcggccctggcaaggacacctacatctacaggtacgcggatcatcgctttttttgttgtttttttttgtttgttttattcgttttagcgttgggttgcccggtaaaactctcgttcgttccatggatcgactctcttttagtctatcttctaccgagtgtttttcttgattgaaatccaagcgatctccagttccgcttttgcgaagtgaattttgctccgctagttcgttttccacgtcaaggttgcacctagatcgaatctttttatcatgtcttgggttctcctggtttgtgaagggaagtattttcgatctgtcgtcttccattgattttggtggtatatatgtcatgttacctcgtgtgttgatttgcagtaactattatgtaatctttcatttattagagaagtaatgctgatctggtgcaattataagcactcaatacggtccgagttcatagtatggatctaattctctcccatagtttaggggaatatttgatgcgaatctcttctttcggcgtatgatttactgtacgtctatattatatctgtttggtttactactacgggtacttgttagttgttgcgaatacttggatgcattttagattatgaggcaagcctacaatactgtagtcacctatgcaacgtattaaacaaagataagtgaccaatcaaatgacctgttcgttgattatcatataatcctggtcacttggtaccacttggtatcatcagcttgcatttctttagttgtcagttgtcagtcttctccatcaactgaagattaaagaaaagaaagctccttgagagtggaatagaagaagaacgacatccattttttttctttatttttttcatggttagcaatggttgtgacacatgatgctaatttgattccgtttctcttgcagaggggaggtggcattctgcagcaaggagtgcagggagtgtgtgatcgagtactacgagcgcaaggagcgcaattgctccctcacttccatcaaggacaccccggctgtctccggcgccagcggctccgaccagtccggcgccagcggcagtgagaccgtcgccgccgcttagccggccgccggctgcaggaggaggggggcgagggagtgtctccggaggtcttggctcgtccctgcagataggaacaacaaacaccatcaaatccattcgcttcagcctagcttagactgtgcagggcgtgtgccatgtggtacatgtcatgttacaggcttttgtaaatacagcttagctattagctcgctcagatgaatgtgccgggcggtcgtaactgatgatgatgatgaatcatggtttcctttcatgtgtaaaggagaacaccatcacctgaacttggggtgattgcaacagcagattgcacaaatcttctctctcttttgtggtgatcaccctttctgctcttaattttgcacactgggttcttgccaagatgatgatgataagtcgtcctaggcgcctctcgctccggtgataagatatacaagcagcaggtagggcaagttatggatcatgcagtagctatatctagattgtgagtgccgaggcggctgcctgccagtttcagctgcggaatttgacaaagctactgggtaggagtaggagaacaagtctcgccctcaagcgaattaagcgtagtatatagtgtgtgtactagctactgttgcctcaggctgggagaaaagaaagacagagaagtggtctagctagtgctggagcaaacaagacaagtgcatgttgttatcctgcaaattctagacggtgtggtccagatccaggtgagacacccgtgatccgatcggcattgatgcaatcaatcggcagcccggcctacctacaactacatagacagcgccaccgctgcacggctgcacactccatatgcgtgcaggcagcggcagcgctcgctcgctttgaccgtccggcgaccgagcattttcgccgggcaaaatgtgcatcattcgatgcgtacagttttgacacctgtgtgtactagagcccgaaattggagtccaagtgttatagtagaggagattgaaagagtccaaccgaaacactgttcgtctgcaaacgagaactgtacggtactctgcgctgtttttttttccgtggaagaagagaagatcgaagaggggagaggaggttggtcggtacggcggcgccaccgattttgatctcgccgtcaaggccgtggcaccgtaaccgacgacgaaacgaacgtacaccgatgccgcacgccgcgacgtgccgcgccgctggatgggcggcgcttcgctggtggtggctgcagcggccgtcgtcacgtacgccgcgccgcgcgggcatcgttttccaagcgcgattcggcggccacgtacacctacatacgtgcgccatgacaacaccaacgctagcctaaagctatactgctgaccggttgacatggcatggcgtgacaccgctcgatacagtatatccatatccctatccatccatcagcagcagcagacgaagatgggcgcgacaccatgtcttgggaatccgacgaacgagcaggagtagcagtttattgcgacgcgaagcaggcctataaaaaggctcattcacatcaatggagtagtatacacttgcagcttcttctgcctgacaaagcacacggttcacagcttcttccgcctgacattctgacgctttacagctccttgttgtatacgttgagtggcgcgtcctccgaatggtacgcagtggatccctattattctactctctctgttttataatataaggaatttattcttcaaatttatcccgtgatagtattttattttttacctatccacttatgtgctattttattcctcacatatcaccaatttatactagtttatttaatgtctactatcatcttttatgctacttttctaaaaacacaatataaacacacacacccacaacgcgagcatacttatccctatgaatacaagcacaccatatccctacacacaccatatccctacaaaacaaaacaaaatgggacttatccctatgaccgtgtttagttcttgtgccaattttttttaagtatacggacacacatttgaagtaataaatataaactgataacaaaacaaattacagattttgcctgtaaactgcgaaacgaatttattaagcctaattaatccatcattagtaaatgtttactgtagcatcatattgtcaaattatggcgtaattaggttcaaaagattcgtctcccaatttacatgcaaaatgcgcaattggtttttttcgtccatatttaatgcttcatacatatgtccaaatattaatgcgatagaattttagaagtttgaaagaaactataacacgacctataaatcttcacaaaatggagtaaaaaaaatggcttatgaaacagggtactaccaggaggtactacgaggagtatgatgttcgatcttctcggttacgggacgaattgtctgtgtcaaatcagaagtatgcagaaagtacatcgctttgtgttatggcattggagcgtacagtttggtactccatggctttcgtgacagctggcctcctgcgcaagccgcctgtctccccacagtcacatgccgcgctgcctacttcaccatctcctgcggtggacgaggaaacatcacattctttaggtggtgtttggaaaagagggactaagggtgtgtttggatggagggatatgggtggataggatatggcggcccattttctgtgggtgtttggttgctcggcaggggtgggatggggcagcccagggaggaatattcctcccagatgctggatggggggatccggccgcccgagcgcccgggtgagctaggcgagcgagtcgtgtcaccccaggcgagcgagcgagggaggcggtcgcccgggcccgacgacgacgacgacggtgcgggtggcttcggcgggaggaggtggcagcgcctacggccggcgggaggaggcggtcgccggcgacgcctgccggtgacaacgacaatgcggacccgacgacgacgacggtgagcgcggcgtcggcgggaggaggcggcggcgcctacagccggcgggaggaggcggaaggcggcggctggcgggagtaggcggccgccggcgggaggagtggcggtgagctctagatctattgctttttttttcttttttttcttttttatatgtgtatttataatatggagaggtagtggtgtaaaattgctacagaatttataaaatgcattatgcattaacttgatggaggtatattcaccatctcaagtgagaggtgaccacacctacaaatccaacctactccctccaaccaaacaaaaaattggatcaccaaatccaccttcatccctacaaccaaacaaaaaactggatcgccatattcattctaccaaacaaaaaactggatcgccatattcattctaccaaacaaaaaactggatcgccatatccaacaaaatatagaccgctgtatcccatccaaccttgaccgtgaaccaaacacaccctaaacactttagcctatctcacaaaaattttagtcactatggaaaggacttgtacttttgtgagagagactaaagtttactccctccttcccaaacaccacctttaatcacctcttctacatctatccattgcttctcagagagagtattaaaagcacgtaagtatagaaaattcatctagccgtggatatccgtgtctaacgttttaccgtccgtcttatttaaaaagtttatgaaaaaataaaaagaattagacacataacgtacaattcatgttttatcatctaataacaataaaaatactaatcataaaagtttttcaaataaaacgaacggttaaacgttgaacataaacacaagtgtagaactgcactcattttggaacggaggggtactgtactactacatgcacttgttgcggcagtaacacgacagccgcaattcgataaatctgcaccaattaatctactaactagtactcctacatcatgttatggtttttgttgtactcatgctattgtatatttacatgtaatcacggttgctttggtttgcagtttggtggacggcgactccctggtaatcttacaagttacagcaattgattactagtatatatttttcacatcagaccgtcttctgattaaaatatattgattgtacctggagtctgaaagagaacattagcaatctagccgatagatataaaattcagttaagaaatggatgcagattccccattagctgctcacaaagagagagatcccatgtactttggcgggcaagtggttgcattttgtattatgatgtgtcgctgtaacacacccaaaagtgaggagaaatgaggcttgtgggggccattgctgacgacacgaattatgggcggcacttaacacttcacagttcacaggagtactgtcaattaatcggcatatttcttgtttcttttctctgaaaaaggtcaccgttggtgcagagtattgtttcacacacagtttgattttatggagtaaccaattccaagtggaaaagtagtgtagtatagataattagcacaactgtgaaccatttgtgtctacattccattggttcttttgccctttcttcatgctcaggaggcataatgaaaagtatgctagaggagctagagtaaaggtctcgctccaattggtatatgtattttttcagtcagtatcaattataatagccaggagacagttctatgtcctattaataaacaggatgcatatatatgagcatatcggtttctaatttttgaaatagtataaatgcataatagggaaatgactgtacctgcttatagagtagtggagcagtatatgtgaagactcttctcggtccaaattattattaatttgtgggaagcaacaaaaaactgaactattatcatataggagtatgctacatcctgaacttttctgactatgataccgcaccagagccatggcgttttcttaacttctctatccggaacggccggagaaacgcatgtatgcaaagtgatgtgcaaagattagccccggcgataaacaaaaggggcacagacgatggatgtacaagtgtctagtcacgggctcacggcaccatcatgccgccatgtgttgtacgtgctgtctactcgtagcaaattaaagttggtctcgccgcatgccctgcctctgcctcggttcggtggtgaccaactgaccatctgttgcacgtgcagtaattcctccatccgaccatgccgcgtgtcgcgcctgccgttagggctgtcaagtgtcaacaaactgagctcgctcgagctcctctgcttaagctcaaaccgagtatattcgacctttaagctattaacgaagtttagtctagctcgatcaagcttgaacttagccataataattatcttttgatatgtataattggtagtgtggtccacgcatattgtgcagctaacaacattatatttttctcacataaataacacatatatttccatattttattattgaaatatattaaatgaaaaactaattttaattatgtagtgatttgaccaaactaaccaatatgcaattttcatattgtattgtatacacgtgatagttatccttattttttaattataaatttcagttatttatatatagtattcctatataaactctagactcttctttcaatatttcttatttttatactttgaatttcatttgtttctaaaatgtatttatatgtgaactctatacttgtcgacgttttttatcaagactatggtatttgtatggtatggagatcgttggtaccagggtatatgcgagattgaggtaaaagagacaaacaaggatttttatacaggttcgagccccttatctaacaggtaatagccctactcctgttggccgtagctagtgttacttcatattcatcagaattacacaagtacagtaattgggataacctatgtagttgtcgtcgacttggcggcatagataaccaacacgtagtcgatgacaaggtagttttcctccttaagtacgaactcatcgagatcagagatgacactagattcctcttgtcgtcctccgtaggcatatattaggtttgactaggcttatttttgatgtcgatgtctggcggcgtgtgttggtgtctattctgacttgtatgtcgaagtgtctcgttgtttcctctcttccactggagggtcttatatttatacccatagacgtccccttatctaagtagaactagagagacaagtatgaatacgatccgagtagtccttgtcgtttccatacagaaatctactcgtcctttcttatccggaactcctcctatacacgaggcatgattccgtataaaacttggtatattgtgggccccgccgagccttagtcgattactattgggtatgtggtatccataaccatgacaatactcttttccagtatttttttcaattccgaattttagttatttctaaattgtatttctatatggattcttacctcaacttttaactttcttatttttaattctgaatttcaattagctctaaattgtaccggtatggactctagtgtactcttccaatatttattttattttgttccaaatttcagctattttaaattgtatttctatatggacttgatttttctttttctacaattaataagagaatttctaagtcgtgagagtgagcatggaggcgtttttttctattactttaataagttaatagactatgtaagttaattgtactaataaaaagtaggaaaggactaggaaaaatgtatgctcctaacacatactaatttatgtgtagataggtactattgtagtatgaagcacgacaaagatatggtttttacgtgacaacctttgcgaaaaaaaatcacgagtgccgatgagcaataatcagtacgtatcgagggttgattacaaatgcaggaattacaagggcggtcacactctcctcatacgatttacaagagattataagagggaaaagaccaaggcctaataaagaagacttgatatattgcatgctgaactcaaattacatatataacaatttcgcctcgagactaatatccctcgtggcataaaataacatcaatcaccccaagagtctcacgtagataaaatcaccgcattcttacatattgattggccataacgagtatcttgtatcacagtccaagagtgaaagaccatacttcatgctagctaataggggaactgggaagatttgaaaccatactagtaaacttttctgattatattttatattattaatttatcgaattaataagatcaaattcattagaagcttgagcttgacctgacaaatcttgcaagctttgtcttaggttcggtctagacttatttggagctcaagccaaactttaatcaagcctaacgagccaacctcgacctgctcgcgactcgcaagccggcgttttttaacgagttgcaaagaatacctggcaaatcgccattgggggcccagatctaattttcaaccggcctcggcctcgaccaggtgtactggtgcgccggtaatggctccaaagtccaaagctggaatcatggaaaaagtacgcccaaggtccctcaacttatcatcgagttacaaaatcgtccctcaaccgcaaaaccagataccgggcgtcccttaactaacaaaaccgttgtgaccccggttttatccaacgtgacgactgagttagcgcgtgggccccacatgtaagatgccaggtcatcaccctatttcccctcctcccttcatcctctttctctctcttttcgcagggcaagcagcagggcggtcgacgggtggggaggaagccaccgcgtgcgcggggggtgggggtggggaggggggcgggggtgtccagcgccccgcgaaggcaacgccgccttcttcttcgcctctttccggctgctgagcggagttgctggcggcggttagctccaccacatgtcgccgggcttgacgcgggggatgcagatggcagtagggccatgtctcgccacgcagcagccgtcgccaacaatgtagcagaagcagcaggggatcgggtttggcggcgggcagggtcagggctggagctggaccggtgccgatgtcttccttggtgcgcgccatggcagcggtggcggagaaaaacacagctgtagagatggaggaggcgcgggcgagggattgtgttacgaggacggcctccgtagtcacgttgccggagaaggggaatgtagggtcaacgaggggggcggggagaccggcagcgagcgacagagagggaggaggcaggtgtcacgccccgaactagtcctgactggaactagcccgtgacgctccaaattaacctgttaatcgataccagtcccaggaaacagtgctggtatcacaggaagacagaatatcacagcaacagaagtctctttattatagagtagaagtacagtcatgttgggctgcggatagatcccgagctcacaactgcattacaaaagggaaacggaagccaggacttggaccacacaacacaggcgcgacttgggaactaggccgaaaccctaaaactcatcgtagccggcttgctcctggaagaactcctcatcagcaggatccgcttcatcttcttcagcaactggggggggattatttatatagagcaagggtgagtacgggagtactcagcaagccaggggaaataagtgtttattgcaggcttcaaggaaaggctgttatttttgcaatttattttatttgaactcttttctaaaatgactaggtgagtgcttctcaaacaactcggatgagacagtgcgtctcgtccggtcggagtatgtgcaatgcatcaatctttagaattgaaacaagattggcacccggccaacagcttttcaaacggccacccgggccaacaacttttcaaacggccacccgggcctagctgatcccgtcagctgctgatttttcaaacatcgaaccccttttcacaacagcaatttcacaagcagtagtcaaacaaaactacgctaggaatcacctcacatccgcccatgaccgtgggcacggctgttcgaacaatttgttaacctctgcagagggggtacactttacccacacgacattactaacccggatcacccagcccgtggggatcagccacgtcgggagacctccaagctttcatgacaaggcatttcgaaagccgatacaggtttatcatatgccgacgagaggggtcccagaccaacaacaggttaggtcccagaccatactgtgccaggaagcccaggggtcctccccgacaccaccccggcgaatccacatgtctctcggcatcaaggctcccctgataagctagttactcagccaggggtgtcccattccacccatgtggtcgtacttgtcttatgtttggattaaattccaaggaaatcggtccttaagtgcgagagcgggaaaccgtacacccggtacgttccccggtccgcggttctggaaattcatttagttcgcaagcaccgacccaggtgtcgggttttccaaatctttcgtaaaacccaagttttacccaagttgttattcagattataagtttgaaggcgtccgtcgatactcgcacaggatgcacgaatatcaagacgcaactaggtggttacaaggggacatgctataacaattaacaaggaaaggatcaaatgcaacaatttaggtaggtccgccaatctgccttgcagatggaacaatagattaagtgcaatcctatcaatgcataatattttgcaagcaatataattagatttcaaatataggctcaagatgttcaaaggtggcttgccttgctcgagatctggagcttgatcctcgaaatcctcgcactgcgggtcttcgggctccggaactacacgcgaaacggaacaactcaacaaacggcgaaaataaagccctatttgacggagcgtgggggctcctcaccgggagaccgcgcaggcccccctttgccggttcggccgggggccctgggtgagattctaagctcctggtgtgtggaaggttcgcgagaatggaaacacacaagacacgggcgatgtatacaggttcgggccgctgagaagcgtaataccctactcctgtgttttggtggatctatgtatgaagaagctacaaaagagctggagaaccagagagctcttactctctccctctctgatcgttctggatccgaaaaaatcatcccccaaaaaatcccccctctaagtgggcaaggtcctccttttatacctcaaggggataccacatgcaccatctctctcttttttgtggggacttatcctatcttttcataaacagacggagacttgtatggttgccgtccgaatgaccttctgatgggacggcccatacctacctccacttccgccggaagcaggcgcgacgtgggaacatggctgtctgctgacgacatgaccagtgtcagaccggtcacaaatcggtcattcttgtctaccacgcgtcagtttatcaatctgcatgttcgcccttcttcatacaatatcttgcctgtaatggttaggatgaagcctggtatatatctgaccgggaccaacgtgccatctccaggagctaacacgccggctccggctagggacaagtgcttggaggctctcatcctgacgggatggggcgaggcgtgcgtcagaccgcctgtcgccacctaacccacgatctgatcggtctgtgactggtcacagaccggataaacgagcgcgctgcactgcgttacatgcggcgtgacgcgctcgtccaaaccgcaataaatgtggttaggtgagccccgctatgctcacctaccccatatacgcggcgcaaaacccacaaggggtcggggcgcctcggctctcggggccgagacgggagcggtccgacccctcggggagacaaagagaagggcggccgtatcaccctcgggcccgacccccccccccccgagggggttaggccacgtgggtgatcgtgtctgcctcaagtctctaagtcatgatactctcggtcccatgtcaccgacactattaatgacctctaagcgtgccattagatagatctcgagatttgaggaattttggaagttgaacggagtcaaacggatttacgggtgggaagatattgaatttctaagattattggatttttggtctaacggaaaaaggatttaattaaatcctttttggaaaagaaaaagaaaagaaaggagggagggaatatagacttttctcgggtggctagggtgcggcccaagagatttggggcggctcggccgagcttaacggaccggccggcccaagacggcccaagcgcgcgcgcgcgggagggaggagagagagggagccggtggaccgggctcaccacgcgtggtcccgggtgggacccgcttgtcagcggctcggctcaccgtgtggagggagcgcgcggcgcacgcgcgcgggcggggttgggacgcggtgcacgcgcgcggctcgcggtggacgcggatgcggcgggcccacgcgcagcctcacggctcgcggtggaacgcgcgcacggggagggaccgaccggggtcggctcgacccggtctaggctgagctggcgccgacgtggcgcctacgtggctgccacgcgggccggcgggaggtagacgacgacccggccgcgaatggacggcgggtggcggcggcgagcggcagagcgaaccacggtgatacaggcaaaagcgagcacaccgggcggttgcacgggacgaggggagacgagccaacggctcggattcgccggaggttgctcgacggcggcggattgcggcggcggcaaccagcggcgagggaagagggaaacggcgacgaggccacgaggggccgattcccggcggtgagagcatctacgcggcttcgggaactcgacgctagcgtcggattgggcggaactacgccgagcgaggccggcgacgagcgggtgctacggagctcgggcggcgacggcggcgagcacacggcgagcgacggcaacggtcggggcgacgccggctaactacggggaggctactcgagctactaccgaaatctaaggggaggagatggagcgaggaggaagaacggagggaggcactaccgtgcgggacggggcgctgtgacgagaggccgacggcgcgggagtaatctctccggccttgggccggggaagaggaagaagagggcgcggccgaagtcctcttccacgtccttgctcgtgccggctcctccgacacgcgcaacgatgattggcgacggcgaaacagagggcggcaatggcgcggaggcgaaaatgagagagtttggagggggagggcttgggcttaaatgggcggcaatgtcggtttgggcgagggaaaccgacattgaacggtcaaggcgcgagctggcgctcggcgcttgcagccaaagcggcggcaggaggatgacgccggcgaggaggaaaaaaggggaaaaggagggggagaaaggggcttgcccctttgccgattcgggaaaaaggggaaggggagcgggagcgtcgcggcagagggaggaggggcgcggctccgtcccttggcggcttgcgcgcggagtggcgggggccgggcgatgacgacgacgatgacggggggacggcttggagcggagcggcgacattggcgacaggcgcgtgcagaggctgacggcggcggcgaccgggcggtcgaccactcggcacgcgcgcgcggcttgcaacgggcggcgtccgcgcgggcgcgcgcacgcgaacacagcgcgcgggaagcggcagcgagggagcggtgagggaggacttggctcggcgcgggcggcttacgcgtgctggctcgcggggccgagcggaggggcgcagggcgcggctctcgcgctcgcgcgtggcgcgcgagggaggggcgctcggcgcggcgacgcgcgctcgcgcgcgcggcgcggggcggagcggagggagagagggagagagcgggggcgcgccggggaaagcgagagagagagccgggagagagaggggaagatgggccgagggaaaatcggcccatcgaccctgggggaggcaaaatggacttttgcggaggaatttgatttggagggattggattcggaattgaactcgacgatagatcggggattgagatcttgagatggcacggatactagacaacaagcaaagaaacaaatttcgcaattagggtttttaagagataatttccccgctaggcgccacgacggaacgggcgctacagcaggtctggcgaggggggcggggaggccggcgagctcgccctcatcccacctccaacccctccccgcctcctccctcttcgtatgcactcgctgccggcctccccgcctcctccctcttagcatacgctcgctgcgggagctgtgggggatggcggcgttctggctgcaggccaaccccatcctcgtcggtgccgcaccaagttgccacatcgccacccgtcgccagctgccctaccagcctcctccgcaatccgcacccgctggccgccctgagaagagagagagggagggagaggaggggaaaatgggaaataagagagaggtgatgatatggcatcttacatgtgggacccacgcgctgactcagccgtcacgtcaaataaaaccggggtcaaaaccaccgaaggatctaaagtgaacggttttgttagttgaggaacgcctgatatctggttttgcggttgggaaacgattttgtaactcgatgacaagttgagggaccttcggtgtactttttcctggaatcatctgtcgttccacgggccacggccgccgtttggcgacgagacacgcggcttggcccgcaaaaaaaacgaggattccttcctcggtcctcgggtgttgagttgggaaagcccatggcccgtgacgacgtacgcgggcgtttataacgacgcgacagagaggtgcccgcgttgcagcagccacagtttggggataatccgattctctactccccaagtgactcactcaccgatggcgcctcctcctatctcctcctccctctcgctcatggcctccaacccaatcccgtcgcctccggtcgccaaaccgggcaggccgctcaccgtcgcggcgtgcagcaacagcagcagcagctcctcctcctcctccccgtcgtcgacctcgtgctcggctgcctggagtctcccggtggcgacgtcggccggcaggagggggctgctcgcgctgggcgcggggttcctggcttcccctgggcttctgtgccccgccggcgacgccggagcgacgcgcatcgagtactacgcgacggtgggggacaagctgtgcgacatgaacgtcgtcaagtcggggctcggctactgcgacgtcgaagtcggcaccggcgcccagcccccgcgcggccagctcataaatgtcagttccgacagaagagtttctcgcactttctctagaagaacctgtgttttctgaatatgattaactcctgtatggagtaattaagcattggcagatcataaatttgcccaatttgcatcagtaccgatcctttagttagttcgacaacgaataaacctgccatttttttctcgccatgacactgataggagtttcaagtgtgttaattggagttgtgttcatggttgtaaggtacactacactgcaagatttactgacgggatagtgttcgacagcacctacaagcgaggacggccactgacaatgcgccttggcgcaggcaaggtgcgcagcttttgttcattgcacgtacatcttcgatcgtagcaagcatcttatgtagttatgcaaggaatcttattgtttggttcgttcgcattttcattctcagatcctccgagggcttgaacagggaatcagtggtggcggtggtgtgccacccatgctcgttggtactgtcagaaatccagaaataataagcatatgcatctctttgtgtgtcaaatgctaaaaatatagtactgcttttatttttcttaatcacatcgtgtctctgttgaaaatcgcaataacattacaggtggaaagcgcaagcttatgatacctgcaactttggcatacggacctgaaccagcaggttgcttctcaggtaataacgaaagaaaaaaaaaagtaatcaaacaagtaatcttaatttaattctagaaatttgagaccagattaagtttcatgtatttaacgatgtttcagtgctatctgtctggctcccttattagcattcgctagaaaaaatatacaaatttacagaagatttacttatttaacaggagactgtaatattcccggcaacaccacactcctatacgacatcttcctggttggattttacaagtgagcatatgatgaaaaggaatatgcatgacttgaacagactaggtgcaaacaaggtatggtggtggtattctgaacctgtctgatttttttttcatctgaaaacagtatcccttgcctaaaggggttgttgtttgttacataagcatgttacattctctggcagattttcgagtaaattttggcgtttcatacaagaggcgggactacggacagatgaagagaaagggtgcgacatgcctaagcccagacgccgaaagcaaatgcgtcaccggagctccttgggtctccaatacgcagagtactacatttgcaatctgtaccaagaagtgaaaggatatataacaaaccggtcctctgatatactatcaaattggtcttatgttttctagagaagaaaagtcttgtgtttgtgtaagtataacgttgtaaagacatgtctcattattcatactgtcattggtacagccaaacacaacaaaaattcccatcctttgtggcaagtcctaactaaatgaagttgaactctgactgaatatcgattgactggtgacttccaaaccttcaacagttcaagcaagctaatcgactgtatcaatactaatgtactcaaaaaaatgtcgaaagttcgtgtcaaagcacatgtgcagtagtagctttgagcctttgactgctgtctgcactgcagtattgccacaagataatttaatcataggtttgttaaccatcaaatcgaaacatgcattgttcagacttcagagaatatcctaaaatccttttatgaaaccaaagaacacccaaatcgtgagagttgaactatcgattgaccggttcagagccagaactggtaggtgaatgagggaagaaaaggagagctgccatttccgtggcaggaagactcaagaattccaaaagcttcttgtcggtttaaaacgaaaacctttttcgtcagatgctctgaatgctgctcggtgtcatgaaattcctcatggttgttggcgaggagcccatggtaaacactaaacacgtaaagtatctggtggaagatgaaaattggagaagccacggagaaaaataaaataattggaggttgttgaacttgtggttttctccgtacgtatatactccgtatctgcgttctctattgcatgcatcacatggttgatgcaaaaactgctggcattgtatatttgtatttggttatggccaaggttgaattggttcctggggacaccaggagatcgagaattgaaatgtgttccgaggatctacgaagggtcacgtccacgcatgtaacacatttttaatggagactagtgaacgtgtacgtgcaagtcacgtcgacatatattgaccatatacatccattgtctaaatcaatcatgagggttagtatgtggtaacataaatcataaaaaaattatgttctggtaatgtaatcttattggaataaatcattccttaagatgttgatagtaagtcccatatcattcctccttggttatcttttcacatgttggcgagcttaccatatcaatttgaggttctgtatgtacttaaagatttcttgtttgatcaaatttattttgaatttgtaaaaacaaacccctacccccatgcctctctatgacatttttcttccgtacactgaagcagcaacaaacactgactaaacatatcaatgtgtctaagttattttcaagatgtctgaagcagcaacaaacactgactaaacatgtcaatgtgtgtaagttatttttaagatgagccaactcacagctgtttgctccgctccctgtgccaccacagctccttgtacaacatgcccaccaacgtcgcctcctcctccacgccatcgtcgccagccgccgtggcgccgaagttgtggaaccagcgttggctgttaccgccgccgccgcggcggcggcacacgccccacgggttgtgtcacaggtccactcggtatcgctgccaccactcctggtcatcgtcatcaactgccgctgccatccaaacttcgtgggtggccacgcttgtgcggacgcgatgcacgtagcacagctcaccggtgaggtccgcgagacggtcgttgttgtcgcaggccgtgcagcccagagaggacgggaccgcgtcgaacgcctcgtctcgcaggctgaaccacaacagcgcgcatggctgagagtcgttgatgaaccagtagaagaaacccccacgcgtgcaggcagcgggtctcctcccgccgggactgatggcacgcgactggtcttgcatgcgctgccatccatcgccggcacctgtgtcgagcgtgaagatctcgtgtccgatgttgtagaccggcggatcgttgtgggacttgcagtagaagcacctgacgacgacgtacctgttccgccatgcggtcgaagccaatcgccgccgttgattctgtagaccgtgggcatgggccgctgccactgctgggcggcagcacaacgagctcctgggtggccgggttgcacacgagcatggccatgtcgtacgtggcgaaggcaaaaggccgtcgcagtgggtagggatgatatggcaggtgatacggccgccgttagggatagacttgtggagcatcggatcagtctcggcggtgatgtctagcggtggcgccgccaccgctctcgctcccggtctagccgccgctcacagggtaagccttagccggtgaagctgacaacctcggagttggagagtgtgctttgttgtcccatatatcttccgtgcttgtgacggcaagcaaggatgacgttggcagctgcctcgcgcgcgaccgctcgaggtggcagcggaccaaggcggggtcgtcgacggcggccacgagcggcaaactgccctgaaacatgcgagggatgttactgggaggttcatgaagatgtgggagaagaacacgtcgtcggggatggatgtggcggtgcccgcataatcttctgggatcgcggcaacagcggcggcggccggtggatgcggtggattgatttgccggtgaggtgaggcgggcggagcggcggcgtgggttcgttccggtgggcggcgcagcatggggatggcgcggtgtggtgcggtttctttctttcgcagtgattctttttttcgtgcgctgtgcggtttctttcttagggatgacaagtgggacccacgtgagagtgggtctaaaagattgcgggattggtaatgaactggtactttttatattagtagattagtatagagtatagatatagatttaatcaagaatttgtgcaaccggacccacgtgtcaatgagataataacgcaggattaagaggatgattattgtgcaagattaattaaaggaacatgggtcccacctgacctgacagtgtcccttttcttctcttctcgatttctcctcttctcgatttcttctcttctcgttcctctttcttcttcatgcgcgcacgagcggagaagggcgaggcgaggcgaggcgaggggtgcggggcgcggtttttttcgatttgacaacggttaagcgctaattgcagggttaagcgtttttcgatttggcgacggttaagcgctaattgggagggttaagcgctaattgtaactaaacaacttgtgctttttatattagtgtaaacaacttgtgctttttatattagtgtagatgaagtcggcttgggaatttcaaatttccaattgcacaattgcactgccttctctgtatccaacaattcatttcccctttttaaaaatagaaaataaattcatttccgattaagtcaaaatttcccattatctaaaaaaatcatgtcaaattggtttccaccacttttcccaccacccaaacttaacttccaaatttcgataccactatgagactccaagttgtttcttcaaaccgtgcttaagtcgagtagtatcccagcaaattttaaattttcaaacaccgtgtaatttagagggatgctatataacggaatctcgttcagacgggatgatacctacgaggtataagttctaatacctgtgagagtatcgacttcagataccggtgagtattgaatgattcatgcgagctatcaggtgatacttgcgaagtatcagacgacactttgtgttaccagtttataataacaataggcattagatgattactgtgaggtgttagttgatgcttgcaaggtaccacgcgatacttgcaatatcatgttatgatatcggtgggtatcagatgattcatgtgaggtatcaagtgatacttgtaaggtaccacgcgttatttatgatatcgtattatgatattatagttatcagatgattcctgtgaggtgtaatgtgatacttgtgagggattagacgatactcccagcggacgacaatgtagttgacgaggagcaggtcctcctctaccacccacggtccaagccaaaggtcatcgctggtgttcgcgtcctccgtgtcgagcaggtcctccacattagaggtcatcgctaacggccgtgtcctccgtgttaagtaggtcctccaccattcacaccccacggcgtatgtcatcactggcggccccaccatccacggcccacgctagaggtggtcgccggcggctgcatcctccatcgtccatgccccatattgaagcttgtcgccgacaaccatgtcctcttctcgctaagcatgtcctcctccacggccgcgccaaaggtccgcggcggcggccgtcttctcctcgttgctcagctctggctcctccctgcgattttcttggatagagaggggacgcacgagaggacccggatcccgtcgtataacatttccggtaatttaactcgcaagcacaatctttttcccacagcaccagcccacgtcgcggtcgtctcgtcggaaacctgaaaccaccacgagccaagagcccaagagcgaacccacccacccacccacccggtctgtctcctaaccccggtcgcttctataaaacggaagcccgagacgagaccgacccaccgcaccgcgccgcacttgcgccagaactcgggagagcgaacgaacgcctcgtgctcgtctcgtgcaacaaacgaatcctcctcttctttattctttttttttttcgtcctcgcccttccgcctccttggtttcgccgccaccccggcgatctccgtcgacccacccgcccgccgccaccgcggatctcgctcggtttcgccgaccctgacggggaaccaaccagagctataagacgcgcccctcccccctctcgctctcgatcgagtccgcgggcgtggttctgttctccgattccttcccaggtatgaatgtgttcccctcattcctttccccttttttgcgatttggaatccatggtgaggggaatggcggtgattttactggattccgcggtcgcttctgtttcctgatctccgtagtgtggttattttggtttgatgcgtggaccagccgtctccagattgctcaatcttagtcgactagggaagaggaagaataaatcgctgaatgttgtgttgttgtttctatggagaacaggatggctgcttccacgtcccagcatgcgctcgtatccgtcaagtcgttgtgcaccggtgccaactttggtttcgaaaagagaaccagcaaagtgcgttttgttttggttgggaggtgctgctcgggcacccggaaattgggtttggtatgcgcttcaaactcacattcttcggtgatggagccggctcagctaccattgagccccgagagcggaaacaccccaaagaaatcaagtaaccatctcaaatcctgttagacttggaatgtagtagctgcacattctgttattgctataattgataccgtgatgctataataacattctttcttcttgcaggtgaaagtgcgctcatattgatccggcatggtgaatcgctatggaatgagaaaaatctatttactggctgcgtcgatgtgcccctgaccccaaagggtgttgacgaggcaattgaggcgggtaaaaggatatgcaatatcccagttgatgtaatatacacctcgtcactaattcgtgctcagatgaccgctatgcttgccatgatgcagcatcgtcgtaagaaggttctctaccctctctattttggacatctccactagaaaaacagggcattttttcatttgagatcaaatatgtaaacagggtctgacacatgcaaccatgataggttccaattgttgtgcacagtgagagcgaacaagctcacaggtggagcaagatatacagtgaagagacaaagaagcaatcaattcctgtcataacagcttggcagctgaatgaacgaatgtaagtttatctgccctctatgatgtagagtgatcattaggtaatatgcacctgtagtttagccacttgaatcacatgagaactttatctcatcttgttaggtatggggaactacaaggccttaacaagcaagaaactgctgatcgttttggcaaagaacaagttcatgaatggcgtcgcagttacgacattcctcccccaaatggcgagagcctagagatgtgtgcagagagagcagttgcttattttaaagatcaagtaaggatatgattgaatactgttctttcagttggacatctggtgtagcaatagttgcttacatgtgtaaaaagtgtggttttacctgcattttctctattattgtgtttgtcatctggtttgttgccatcactcgatgctgcatccaacctaggaccctgtattgacctaccttcctgtttgtgactataccatttaagaggaagtttctgttctaagttgtatctgtcttttgatctacagattgtacctcagcttgtggcaggaaagcatgtgatgattgctgcccatggcaattcacttcgttcaattataatgcacttagacaagttgacttctcaagaggtaatatacttattttctggtattacttttcattattctgagttcatttattgaaacaggtatcaaccacttttgtttcaggttatcagccttgaactgtctactggcattcctatgctgtatatatttaaggaaggaaaatttattagacgggggagtccggcaggcccttctgaggcaggtgtctatgcctacaccagggtaagagttctctctatttacaactggaaagtgttggatgcaatgtcatgattcaaactatatattgcctaactgaaatagaaacatgtcagtccatatgctgcaaactattaaaactatacaaactgaaataggaacataacttgcttcactgatgtctcaacatgtcagtccatatgttgcacccgtactttattaaaccctgtccgtaattcaaatcaattgaccacaacaaggtcttttatggcctacgattgatatcgacgtttttccctgtaattgtaaggagtacattttaaagttgagcagtatattatttgtagttatggacaaatgcctttatctctgcgaatattttacagccctaaattctttaaatttggatgcagagcttggctcagtacagacagaagcttgacaacatgtttcagtaaccatctgtaagtaactgcacattattatcagatatagaaacacattagtccaaagaggttggaatgatcattctttacctttgatgcctgatgcaggctctgtttccaccagcatctgaggaattttcatccgtcgaacatacagtttatccccccatctgccacaaagaagtggctaagcatactattcagtatgggctgcagtttgtagcatccttctttttcgtttcgtttgaaaccatgcagcatgtaacatggatgtctagagactttagggacaaattaggtgatgacctagaagatacaaacggggatgaatttacatcaccattgtgttctcgttttgtggctcaccattcataagatgttgcgataacagaaatttgtaatggattcatatactggacaagttgtgtgtgagctattctgccttttatacttctcctgacgagcgaatgcctttcagcctgttcttcagcaatattattttattaattttgtccaacaaacttagaaaaaagaacacatgtcgacaagacatgaacttgccagtactgcatatctcaattcagaggcgctgaaaccagccaacagatggtatctcagcatggaaaagtcggtgatatttataaaatttatgaattggaggtcaaagcttggcgattgatgcttcgttcatgcaaaacaagcaacctccccatgtgatgaaaaactgcaccggctcatcccaagtacataggtttttctttttttttttttagcctgcagatcatcttgctgcttatactttattttaccgccccactccccagcaagtacatccatgtaatacccatcaggccatcatactcttaaatggcctataattaaacccaaaaataagctgacaaaccagaagcatcctaagtaacgtgatttcatctgctaaatccaagaaaaacacagacaaaaatttccttctccagaaggcaccaaggaggcaagaagaaagaaagaaagaaagaaccaagggcatctagctcccctgaatcccaggaacccatttcaagcactcacaattccctccctgccacccattttcaccacccacatttacaccccccccccccccccccccaattttctgcccccactactccacatttcgctctcgctttgccgggaaaaaaaaccgcctaccacgataggctcccggatgagggtccataccgtttgcttgcttcatttacatcgagctggatgtcaaatcacaattctccctgtgacatcccaaagcctgcctctgttgatgaattcgtcaagaatggcaagaagaagaaggtaagatctctcagcagctcgtccaaaaaaatcccttcaaaaagaggagaaaattcagaatgtggctgaattttgttgcttgttcttgctctattttttttacagtcattcatgtcgagcatctttcggaagaaagggaggagcggcacggggagctcggacaagaagctgctatcgcggagggatatcgtcttcggttagttccactgctcttgatcctctcaagctttctcttttttttgaacgaaccggcactaagcgtgccaatttcaagctttcatcagcttggagaacgagaactccatggttgacggttgcattgtgttttcttttgtatgtttttttgggtaggtttggatgagaaatgcgacgataggtcggagctcttggattcttcccctgccgtccgcaagagcttttcaggcacgtagtttgctgcgtgaacattgcatggttttctgatcattttggagaattcgtatgcaaacacattattacgctgaatacatgatgcagttaagttgatgaatttgtttttcttggtttcagatcggcattgcgccacaaaaattgagagcttgactctaagctgcttggattcaccccacaggcagttcgatacccgggaataccggtaattatttaaactgaatgttattttttttgaagagaaaaggaagttgtgatgaatttggaccctacctgacaattttgcagggtgttcgtaggcacatggaatgtggctgggaagcctcctaacagcagccttaacctggaggattttctacagatagaaggattacctgatatatatgtcttggggtacaaaaatacttcccattttttaatactctgcatcagttcatcatctgacgttgcattcttgagatagaaaaaaacatataaatttgctctatgtttgtgcatggacatgatgagttgaagataactttgcattcttagccgtaatgcagcatgctaacatgaatgccatctctgaagaaattgctgatcaattctgagacgttgcacaggtttcaggagatcgttcctctgaacgcaggcaacgtgctggtcatcgaggacaacgagccagcggccaagtggctgggcctcatataccaagctctgaacaagccccaggaccagtcctccggcgacgagctgtctccgccggagacctccgacagccggcagggcggcggcagcggcagccgcgactccatacccaagtcgtcgagcggcggcatgctcttcttccagaagccgtcgctgaagatgctgagcaagaactaccgcgtggacagcgcgctggtgaagacgtgcacctgcctgaccgacccgtccaccatgcagcgccgggcgcgggagatgcgggagttcctctaccgcatcgaggcgtcgccgccgccgtcgttggcgtcggcggcggcggcggccgacgaagacgggggcccggacgccggcggcgagctggcgaggagcagcgtgaactactgcctgatcgcgagcaagcagatggtgggcatcttcctgtccgtgtgggtgcggcgggagctcgtgcagtacatcggccacctcagggtggactccgtcggcagaggcatcatgggccgcctcggcaacaaggtgctcgacgcggtcttgctttgcctctgctcgctgtttggttcattggattcatggcgccgccatggctggctctcctgcttgcagggttgcatcgcgatgagcatgacgctgcaccagaccagcgtctgcttcgtctgcagccacctcgcctccggcgagaaggaaggcgacgaggtgaggaggaactccgacgtcgccgagatcatcaagagcacgcagttcccgcggatctgcaaggtgcctggccagcgtatccccgacaagatccttgaccatgagtaagccattgccgataaaagatcatgcatttgctcaaggctgcaatgcacaaacattttcacaaactctgcattgtcaaaatgtactactaactaatgatgaactcatctgcaaatccagccgggtcatatggctaggagacctgaattaccgagtcgcgctaagctacgacgagacgaagacgttgatgggggagaatgactgggatacattacttgagaaagaccaggtatgagctagtatatgaagtatgaatgaacaatgctgccgtgtaaacctgcattttttcagatatgctacagtgatatgacacagtaagcacctgcttagtttggtaaaatgttactgacaagatggcattcctgagcagttgatgatcgagagacaggcagggagagtgttcaaagggtggaaagagggcaagatctacttcgcaccgacgtacaaatacaagcagaactctgactcatacgcaggggagacggccaaatcgaagaagaaacgaagaacacctgcatggtaggagaacaagctgcatgctctgaagattcagacatgctagcactgacacttgttgagaagaaactgaaatttctgacggatccatccgtgtaaaatgcaggtgtgaccggatactgtggcacggccagggaatcgagcagctgcagtacatcagaggggagtccaggttctcggatcacaggcctgtttgcagcgtgtttgtgatcgaagccgatgtagataatggaagcatgatcagaaagggctactcaactctggattccaggatccatttcgagtctccgataccacaaagacacagcttctacgatgatttctgacttgtgattagtggttttgtctatactactatacttgtagcttaattacaaaaagcaggaatgtgtctacttttgtagtgggtgggctgcatttttcaagcctagcacttgtcttacactaactggagtaaatggtggcttctgaccaaaatacgtctgaacaacggacaactggctgagcggaagtgctttgtgtcttactaaatttttgatgcgatgtcttagtaaatcacatcatactttccttttatattgcgatgatgttcaaagaaagcagtaaacagttttctattgcaatgatgttcaaagaaagcagaaaacatttctccgattcgaaaaaaaaaaggattgcaagatatagcaggcagtaagtgaataaaccctcgagagaaatgacaggaggaaactgagtgcaacaaagtgtcgtgctgttatttatcatctggcagatattgttgcgaaagggttctcaaatgaggtcacgaaggttgggatggtggtgccgactacaaaacaagtcaggcaacacattcctgctgtgtgttaaagcgtttctagttaacatttggtgttcatctcttggtgagagctgagaattcactgtgttggagttcatatcaacagttggcttgcatttttcatggtggtattcatggatcagacgatgaacagacacttcaatctgccggggttatacctttaccttcgcctggcaagcttgtcagctcaactccgtttgatgaagtcactgcggctttcccattttcagattcagtctctttttcttctctcttgtcagatacagccactgtttcttccctcttcccagatacagagtctatttctgccctctcagattcactctctgtttcttccctgttttcagattcagtatctgtttcttccctcttttcagatgcagtctcttcactcttcaaacctgaactaccttcttgtgccatgtccttgttcaccatcacatatggctctgaagcaagagcagaattttcaggactccagaacaatggcatcttgatgtcatcttctctcatccttgcagcataatcatttatgttaaaagtagcctggtttttgccaccaaatgcagattctaattcttccatgttaaaaaggtcttccatgatcttgttagtctcaggcctatctgggtatacaaatttgaccttgttgaaagtctttggctcaagaatggggcttgcgatctgcatttagataaaacatgatgttaatttagttttatatgctacaatagttagttgcctacgggtgtgacagcaagaatgtatgtgctgtgctccatcattataagaaagttccaccttgaagtgtataccttacgttgtactccattacattatatttgacaatactaaccactgtgattttatctttgacaaatatttttttataattacaatgttttgattaatgcaagtagtgtagttatatttagcatgcaaagtactttgacaatacaacatatttttagatatttataatattttttttaaaaaaaagacgagtggtcaaaattaatactacaagaatagtgtctggtgtcaagtataaaaaacgaagggagggaataagtctacaatgcaaacaagagaacaatgcatgatcagacaattaaatggaacacattatccctaaatttctgattgaatataaatactagtacgatgatcaaagctgtgtaaaaccataccttccagaaagactcaaaaaacttaggagcattgtaaagaattgcaacacccaatctttcaggatagtgaccttgtaggacatctgctgtcaactttgtcacatgaagtgatatgttagataatgagaatccagcaaaatcaatgagccaaaccatctgactctggtcatgcggaagattcagaattgcattctccatacagtataccaaatatctgatctgccccttggccttcttggtattctggaaaacaagataacaaaattggatgactaatcacagtttttatgcacgcgtaaactataaattttttttacaagggaaaaggagcatcaataaacctgaactccaggtctcatgacaagaatactccgtccactcttgtcaaagtaatcagttcggtagatttttccagttgcagcttcgtttgctatctcatcctatattgaaattcaaatagtgcaaatgtttcacatagctctagaatggtacaaggagaatcactcgtatgtggatgtggataacatgacctgttattacttctctggagcaataaaaggtttcttaagtaaagaggtgaggacagcttacccaacggatctcatctggcttatactctgaacgccatttcaaggttttcttcagcattttcgtggccttcttcacttcccagttcctcgctaccaggtacctcgcaatcgaagcatctgagcaatatagcgcagcttttcctgatagttgtcctagggcagctctaacttcaccaatctatgagaagaattcaaaaatgagaaacaacaccaactgatctaacaacacaatagggttaaggaaaaaattgctccacggacaactcataagtaaagaaagggtcaaggggatgatgactaagaaagattgagttgcatttaaatcttatctgatgttttagaaccaaacaaacaaaaacctgaacctttgtgatactggctcaccttggatagccgctgctcaaacagtgccgcttcttttccatcaccattgttcacaccgcttgcggagctcatagtgtccttttgttactacctaccatagagcatagaacatacaagagctcataagaacatcaatctgaattacaccaaggacgataaccacatcaacattatgcattatgcatgaaaagcaaaaatatcataatgcacaagtgttgaccagtgttggctttgctgttatgcagtgaaatatgttctattagcagaaacaaaatcagtagttcctttttctaaaactgcttactgtcttcagctagtgtggcactatggcagcgttgcaatctaacaagccatttagaacagacagcacagaatggctaggaaatggtccatcataaatgcaacgatgttaacattaaccaccaactcgcatttcaacgatatccagttatcttccacgtgatcctggcacaacacaggagcgcacgagacccccaaatatccaatccggtgaacaaaacgaacaacgaggggacccgaacgcctaatttcagcgcagcaagtagcgtcagctcacaaagtacaagtccacaacccttacccagaatcatcgaagctcccgaaagaacccaaccaatctcgcccaaaatcgcactgatggaacagaaccaataaccacagaaccccaactcttgcttcgcgcgacgccaagcacatgccgcaagaaccaagaaacctagccacgttcttgagatggcacccaggaaatgccagaacacaccatgattctcccacaaactccagaacggcgtagcaagaaatgcaagattccacctttcgttggctcgaagccaataaatgcaaccacgcaaaaccaaaatacccccatacacatatccaccaatcggaagatctcccgcggatgcaacaaaacgctcggggacagcaacaaaacccccctcaaaagaacaaagcaaactttctccgttgaaagaaacggatgcttccagtcaatctcctccacccaacagaagccgcgacgacgcaacaaggtaaagctagttcttagcgctcacctcggcgagacgggacgcgcgcgcgcggtgagctcgactgcccgagcccccgattccggagtcgtcgggcttcttcgggttctcagcccaggcgtcttcctcagttcctcctccgtttgctttggaagccggggaagaaccgaagaagggaaaggtaagaagagactggtctgatcgaatctgacggctcagatttctttgactctatcgcgtggacgtatccgacggtggtagggctcgtggtacgggcccacactacgggaacaccgggtaatggagaggggaaaaatacatgtaagattttttgtccggtagatatgagctgtttgtgaagctggctttgggttcgttggcgctgtgatcgtgagtgctggatatgataggataggattggattgtttaaatgatgatttaatcgtatttaattgctgaaaaggttctttgaggtgtgtactccatctatcgcttggagaatctctatgctattatttccagcataactggatatttgggtgtttttttgccattgatcaatgatcagcagctccatcggatgttgcttttctaaaacttgtgcatcaggagacgttggtgtcactcagtatatcaacccttttttgcgacatccttgtaacattttctttggttggaggatgcaaggagttgattcagtacggggctctggtaggcagtagcgtcctgtttgaagttttaaggctacctttttttttttggtgattttgtccatagccgtccctcttgaacgttgaaaattttccaaagtacagtgctggttaggttggagaagtattattggggcaacacagtttgagttggccatgcatgacgctagctgtcacaaaactgttaatttgggggcgtgactcacgtttgtctgaagaacgtgattggattctccagagttgtattttctaaacatgggttttgaccctatctggagctctggaagtaccgggactccgggagcagcatttcattgtggcagcaccgcggtagtggtacgtgtacgtctctccgctgaaaatgggctggaagattcatttctgggccgaatcgacgaagatcttggttgatcaacccagtccgcacgtgtctccgcaacattttggcccaactcacgcagcgaaacaggctgaaaggccgaaaccccggagtcccgcgccccgtcgcttggtgggccgaggcgggaggaaagagttgctatccgatcctacacggattctacggaggcccagaaatcccaccgtttctccgtgctcggcccgcaaaaaacgctcatgccgcccccttcttgccgatcgtgcatcctcgcggcggtgccctcatctgctccgcgattctgcgtgctgccccactacgattcgccagccgcggcggcggtgccgggtgcgtcggtcggtcgctagctgacccagtgagcggtgatcgatcgtcgagatctgtacgcgcccgtcgcgatcgatccagggacggctgagttctgacttgtagtaacaatctgtctcgttcgttcttccacaggtccggtatccgaacaaaggtcaatactagtaaatctttgcaattgtgggatagaatagaagttctttttgcaagataaaacagaatattactaattgcaattatctcctttcgttgttactgatcagcttaagcatgaactttgcttctctgcccttttttgtgaacgttacttacttgtacacctccatacgtgcacaatatcacactcagtacaatcaggtagcatatatatgacgtcaacggtgcctcaatctttcttaaataatcattctcttgttcacataagttagattctttttttttctttttgagaaaagaagatagatggttacacttgctgagcaacttaaatcctcagccccctgaacgaagcagcagatttcccaagcaagcaaatgaaatgcaaccatgcgctggcttggaatagctcgatcagtacccaaccccaactcaatgaactggacccagctcgatcaaggcgtgaagctcatctcgaactcatcatcgccaaccatcatgaaatgcgacccatgatcaatcaccttcttgccgtcctccgtcgctctgctgaagtgcttgcatgggctcacctcgaactccacatggacagtctgcatcgacttgaggtgcaggctctggaagccgatcagctggctcgccggcctgccgccgtccgccgcgccgttcggccagcgcaggaagagcagcacggggtgcctgccgtccatggggccatggttctgcaccctgacgagcgccgggaacttgagcttgtcacacgtctcggggccaatctcttcgacgtcatagctcaccgtgcctgcagctgctgtcgccatcgccttcaggccatcgatgctgctcaaagacggcagcttcgtgccgtttgcgacgaagtggtgagagtacttcgagtagctgaggccgtagccgaacttgtagacggtgttgcctcggtagaacctgtacgttcgtccgggatatcccgtggatggatcggcacgcatccgcatatctgtcatgggcacgctcgtgaactcctttggataccaggtcactggcagccttccacctgatgaacataggtcacatgtaacacagttcagtatttgaacgtactcatctactgatgagaagatcaaaaagtgaatgaaattttaccagggttgtgctctccaaagaggacctgagcaatcgcaatccctccagcctcgccagggtaaccagcccacaggatggccccaatcttgggattatacttagcaaaggtcacatccactggaccaccacacagtagcaccaagatcaccggcttctttgccgcgttagcgaccgtgttgatgaggttctcctgcattcctgggagcgacagttccagcctatcaacctcttccctctcctgatcttggtctaatcccatgaacagcacaacgtagtccactgaacttgccaattgcgccgcttcaccaattgatgacacattgcaggcagccgagttgcacccagctaggaacctggtgtccttcacatagccttgcagcacttggagaggagtcaccgatatgcaaggagggccgaagtaattcccaagcaatctcgtggcgtcatttgcgttgtgcccaatgacagcaatggatgagacttgtgatttggacagggggagagcattggcgtcgttcttcagtaggacaacgccatgttgtgctgcttcaagggcaaggttttggtgctcctgcgtgcacacctggtctgggccaatgttaccgtagcggttgtactttggattgccgttgaagagccccagcctcatcctgacagcgaagaggttgtggagggctctgttgatgtcttgttctgtgatcttcccttgctggattgcagatagaccatgttcctgcacgtagctgccgcagttcacgtccattcctggaagtgtgttgttacagaaggtaagaaacacttcttaaaaaaataatatggagtatatcggatcgttgcattaatgttagaagcaatttgcatttgttgttttattgttttaacttttttgttgatttggacctactatctactgtcttttgctactcattgttgttgacttgaacccttgccatgtaacaccagaatgactacttacatgctgagttagttttctttttgaaccttttatatactgtcttttgctattcattgtcgttgttgacttgaacccttgctatgtaacactagcacaactacttacaagcagaggtgatcttccttttttattgacagatggattcctgatgatatcatgatgttcagtgtcatgccatgaattatttcttagtggactcactgaaatacctttgtttagagaacagatcattaatctcactcaagtacctaaatcagcaaaacgggaaagctgtatgcctgtatgggtagtgggatccaaatcaacttttggttgcagttcagtgacctaacctaacctccctatatctttgcattattcccggagggctccatgtgaggaaaacaaacacttgaaagttgcaaaatagtactacttccgtcccgacacttgtctagatttgtcgccaattttttttttgtttttacagaggaagtaacatatttgagatactacaatatattgtggaattaccccatctctgacaaagagtaataggacaattgggtgattctgaccagtaaatatatagtggacaagtattactaggtgtgatgtgcaaattcataccagccttgaggacatctgcaactgcatcttccgctgtcttggcatatccttggacatcatggatgatggacacagcatcacaatctgaggtgatatatctgtcaacagaggaaaacttgcaaggatcagttgctgggcattgtcacatacacactgaacaaaaacttcatgtctaggccaaagaaaaaactgatagctccagtcattctggcttacccgtaaaacctccaatctccccttgcagttttggagaggaggttgtaatcggcacaagttggcacgccattgacgcggttgtaggagcacatgatgccgctggccccgccgtcctcgacgcagcttctgaacggagggttgtacgtgtcggccaggtcctgcgccgtcacctgaccaaaaaaaatcgcatcactcagagcctcgtcaatggcagggtcacccaattagccagaccatttgctgacagaacaacgtgtcgtgacgggtcaccaccttggcgtcgaaggcgtagcgggtgacgcccttccagttctcgaggtcgtaggcggtgaagtgcttgcagcaggcggaggcctcgaggtcggtggagttgatggcgccggcgagggcgtagccctggacgccgcggacgaacacggcggcgtacttgccggtcaccgtggggtcctcgccgggggtctcctgcccgcggccccacctcgggtccctgaacacgttgatgtttggcgcccagaacgtgagcccttccgcctgcccgttgttgtacaccgccctcgcctccgtgccgatcacctgcgttgcgtgcccccaattgcacagcacccaaaccagaatcagtttacagaggaattcaggtacggttttctctgctcttgtttcgtgttactactctgcatgttgttgcggtttgctgcgttgtttagtagtatctgctttacgacttgttaccgtctcaaaaggttgcggtgaatctcattacgtgcttttgacaaaaacaaccccaaaagttgcatgcatgtaccgaacacgttcttacctactcctataggtccgtaggtgtacaaaagttcatagggccgacgggtgatggattaccaacaagctgcctaaaatgtgtggattattggactcagtatgtaccagtagcaccctgaatatattactgacattctgggcataaattaggcgcaaagactcctctgtttcttttaacccctcaaaggtaaaattgagaaagagactacaaatcgtaattcccagttacacttattacacttaagtcccttccagtactgaacagtaactaaccactggtgttagcgtgaatttgcaccaacacggtaaaaaagtaaaagtgaggaaacgatcgaggccgtgcatgcgctgagcacgtacgtgcgtacctggccgatacggtaccagaggtgcgggttgaatgacgcggcggtgaggatgacctgcgggaagctggtggcggcgcggagcgggccgtcgaggtggatgccgcggccggcgttggagacgccgtggagcgcctccgaccaccacttgtacgccgggacgccgagccggtcgacggccggcgactggtccccgagctgcgagatcttctcctccagcgtcagcctcgacacgaggtcgtccgcgcgctgctcgatgggcagcctcgggttgcagaacgccgcgctggacggcgcgccgcaggagaagggcgggcccgacgccacggcgaccgccgccgccgcggcggccagtgccagcagcagcaggagcggcgccggcgcgtggaggagagcgcgcgcgcggcgtcccatggcttcgtgtgcgggtgtcacgtactgcgctccggagcgaatgtgtgtgtaagtgcgtgccaggggtatatatgaagcaaagggcgcgaagcacatgggagtacgggctgctgacttgtggggctatgccgctattcacgtgcaattacaatcctgcccgtttcgtaattttgcattgacaaatatactcccaccgtccttaagtaacaaaccaggatggatctaatcaccataatatgtccatctcaaaaatatagttaccatgtacagttgtattggattagatataacttagtataacgaataattgccagaatatgtagaactagaatatgatcaatcatgtgctaggtttttatattttagaagagagagtagaatggatttaattctattctaggtcgttatgtccagatttatagttttaggatggatctagtcaaattctagattacagcatatcggaacgaatgctctccatggatcatagtgatgagaaagaaaagagcattgcctttgtatagggcaaattcactgtgttggaacttggaatcaagccttttgttaaacgacaatcttaaaaatccagccatttagccgaaagccagcgatggcaccgaacaagttcggagtgcaacaaacgaaaaacgatcgcatactcctcaagcgatcgatccagatctacgtaaagttgtcacaccacgacgcgtcgtgtggctgccactagctaacataactgctagcgagtagagcagtagcggaaatgctcatgcttacgcttatggaaaatgcttacggatgctgtaagatttagcagcaggaggcaagagcggtgtgaccaccgatgggcaaactcgtgacttcacaggtttgcctgcctgcctgtgctttgtgggtttggctggaccgacgcccaaggaaagcaagcgatagtgcgaactgggaagaggcgaggcgaggctggcgtccgcgcagtagaccgtggtagtggtggtggcgtcctccgccgtgcgattcccgcgatatcctcctcctttgccactccgtggcgcgcctgacgtaacgcaactgcttggacccgcagaaagtcagaaatcgttcgagtcgtgggaaaaatttctgaattatagctcggtgattttatggtatcggatttttgacgccgaggacagacgaagcgtcagccactggtcaaaggagaaagaacaacaagttcggacttcgaagtactctgatactattgcccttgcaacaatgctcgtggtctgatcgagaggaccagatcgctctgtgtgatcactgatcagtggagcctacggcctgaagagaatattgaccggaggttaagattacattttgtctttttggcactttgcagagaagtgactggtgcgtgcccatggtccggtttgtactcgtaccgcatattcataaattcctcgagtaaatttcacaaaactatatatactataactaaattatcacaaaactacagatttaactcggtatatcacaaaactacacatttaacatcaaactagctgggtggcccgctcacttgcgcggctagcacctaaacaaaatcatatattttttagtatggttttactttaaatttgttaaatagttatccctgtatttctaattatatagtttttaaaagtcacaccagctgctaccccttacttctgtcatatccttctttatttgcttgctcggtctaccactatttctattcattctccttgaaactttaaaaattggatctgttttttgagtttattatctcgttgggtttcgtttttataatttctggaagtctcgtcaaacgctgccattatactcctctacggcccgtccactgtcttttctctttattgtcattgggattttacaaatcgaacataattatcgttcgagttcattttttttttactttttataagtcccgccaaaccgtcagcggttttgccattgtactctttatgcctcacccgctgtctcctttttttattgtcattaagattttaaaatcgaacatgattatcattgtttttttttactttttagaagtttcgtatctttaaaaattggaccctgtagtttttaaaatttattgtcttgttgggttttatttttttataatttttagaagtcacgtcaaacgatgccactatactcctctacgacccatccgacacctactctttattgtcattgggattcgaaaaatcaaacataactatcgttggaattcttttttattttctagaaatcccgccaaccgtcggcggctctgcaactatactcctatacaccccggctgctgcttctcctttttattatcattgagattttaaaaatagaatataattatcaatggggtttattttttttactttctaaaagtcccggcaaccgccttacccgtttgcttcacggcctggcgatagttggtgggacttcttgaaagtaaaatatgaattccaatgatagttttgttcaattattaaaatgctaatgacaataaagattaagcggcggatgggtcaatgctaatgacaataaagattaagcggcggatgggtcacagaggagtatattggcagcatttgacgggatttctaaagattctatttggtgtattactaacagtttttatatgtcgaatcaaccgctaccactctactcttttataggcttgttatttaatttatctcaccgtgtgttttagatggtctcttttttaataatctttatttttatcaccaattttagttatttataaattgtattctattttaaatctttttccttttttctttttctaatttcagattttttttaaaaaaaaatatttaataccgtatagtgttcttttaatatttttatttttcgtttttgaatttcagttgtttcaaaattgtattcctacttgaactctcttttaatttttctaattttggatattattttatattttattctgaattttaattaatctcgtatggggttcttatatggattcttctttaaatattgctttttttttaattctgaattttagttgattttaaattgtattcctacttgaactcttattttatttttgctatttttggattttatttttatttttatttcaaatattaactaatctcgtattgggttattatatggactcttttatcaatattccttatttttaatttctaatttcagttatttttaaattatattcctacttggactctcgttttatttcctaatttcgtattttattttatttttatttcgaatttcgattaatctcgtattgggtttttatatggacacttctttcaatattgctttattttaattccgaatttcagctatttttgaattgaatttctacttggactcttcttttctttttctctgattaatgtgggaatttatagccctacagcgaacgtggtgccttagcatcattatattttctctcatataataacatatatgttttctcaatgtattattcaaatatattaaaatgacaatataattttaaatttctaaattgtatttctatatggactctgtttttatttttctccgattaatatgagaatttcgcgcaattacgcggctagcacccaaacaaaatcatatatttttttagtatgattttacttaaaatttattaaatagctatctagctatctcattgtcttaagattttgaaagaacaaaccttatcatcctcgtgtttctaattatatagttttcaaaagtcacaccagttgctaccccttatgttatctccttctttatttgcttgctcaatctatcaatatttctattcattcttcttggaacctttaaatttggattttatagtttttagagtttattgtcatgttgggtttcatttttataatttctagatgtcccgtcaaacgttgccattatactcctctacggcctgtccactgtctcttctctttgttgtcattgagattttaaaaatcgaacataattatcgtttgggttcatttttttactttctagaagtcccgccaaaccatcagcggctttgccatagtactcctctacagctcgcccgctgcctctgttattgaaattttaaaatcgaacatgattatcatttgcttttttttttactttttagaagtttcaaatctttaaaaattggacttgcagtttaattttttataatttttagaagtcccatcaaacgatgccactatgcccctctacagcccgtctgccgccaaatctttattgtcattgtgattctaaaaatcgaacataactatagttggaattcatttcttattttctagaagtcccgtcaaccgtcggcggctctgcaattatactcttatacaccccgcccgctgcttctactttttattgtcattgagattttaaaaattgaatatgattatcaatggggttttttttactttctagaagtcccggcaaccgctttccacgtttgcttcacggcctgcctgacgtccctccttataatcgtcattaggattctattttggtgatttattaacaatttttatatctcgtatcaaccactaccactctactcctctataggcatgttacttaatttatctcgtcatgtgttttagatggtcttttctttcaataatctttatttttatcacaaattttagttatttataaattgtattcctaattgaaatcttaattttctttttctaatttcagatttttttaaaaaaaatagttaatatcgtattgtgttattataatgtttttattttttattttcaatttcagttgtttcaaaattgtatttctgtttgaactctcttttaatttttctagttttagatattattttatttttattataaattttaattaatctcgtattgggttcttatatggattcttctttcaatattgcttatttttacttccgaatttcagctaattttaaattgtattcctacttgaactcttattttttattttcttttgccaattttggatttatttatttttattccgaattttaattaatctcgtattgggttcttatatggactcttcttttaatattccttatttttaatttcgaatttcagctatttttaaattgtattcctacttggactctcattttcttttctaattttggattttaatttatttttatttcattttttgattaatcttgtattgggttcttatatggaaatttatttcaatattccttatttttaattccgaatttcagctatttttaaattatatttctacttggactctcctttccttttctaattttggatttttattttattgttatttcgaattttgattaatctcgtattgggttcttatatggaaacttctttcaatattgcttatttttaattccgaatttcagctatttttaaatagtacttctacttggtcttctttttctttttcttttctttttctccgattaatgtgggaatttctaaccccccacagcgaacatggtgtctcctttcaaagctgttttaataatataatagatttatcacaaaactgcacatttaagatgaagtgtcacaaaactacatatttagtaactaaattatcataaaactacaggtttagaatcaattttatcacaaagtaacgatgtttatagctccaccataacaatgatgctagggatttaaactccaaaagttgtagtttttttataagttcaatattaaatatgcatttttatgatacttaatctaaaatctgtagttttgtgataaatttggtgctaaatctgtagttttataatacaactccttaaatctgtagttttgtgataatttgatcaaaatacctgtagttttgtgaaatttattcaaattactttgtcatcattgatatggctggtgagcctttctggcccgtcgacagacatagtagtgaagtggagtagtagcttgttgcatcactagaattctagaaatgccaaatggcgacagtgcttcgtggatataatttccagtgagcttggtggtgcatgcacttgtttcatcagagtgcctgacaggtcaacacaataatcttgatcgacatggtaccttatctagcaccggcaaacaggaagccgcgacatcattgtgttatatcgggcgtgatgtgtggaaatagacgggagagaggaggcaggtcagagcaagttgcacgggacgtcgctattacagcgagtaaaagacaggctcactctactcctagtttactactacaggactggcttgctaatctgtgttcaaactttcatcgttgaaactcaaaggacctgtttcggagacaggtcgagatcaagatctttacaattgaattggatgtgtgagcgttgaaggcgatcatggcagaaaagttgagacatataggtaggaaacggctttgtaagctgccgttcagaatgaaagaagtgatagagtcacacgagacaagtacatagacctttgctgctggttttactgcaaaattttttgatgggaaaattggaaccatgccattataattttgcaaaatttgagatatgtcatcctgacccacatgtcattgactcatgtaggtcctacttgtcattgagataccgatggcatatctcaaactttgcaaaattataatggcatggttccaggtaaacgtttcacctaatcacctacggagttttttttttcctttctgttctaaagaagtgtgctaggtagttacgattccatatcaacaaaagccggcattcccaggataatcgtggctaactgacgaagcagattgcaagtgcggtgtcggtgaggagctgagtacgtacctcaagctatcatgccacaggtatgatgaatttcacgttggaaagaaaatccagcaacgccatctgatcgtgttaggtggcaattaggtccagggctccaggttgacagagttcttgggatttccattcttctgaactttactgaactttttcattcacatactgacaggtaaggtaaactcaacatttgtccggtccgtagttcataccctactaccgctagtgcactgtgcaccaaacagatcgggcaattcagcgcttgttttcttgcaagcgtttggactaagcatgcatgttcctggatctagaaactgtacgcccacaactccacaaggccacaacatactccaaaaatgaggacagtgtacaactagctgcacatgcgatggtattgcagctaatcatatgagacgtggagaaaacactgcaagctccaggtcaccgtgaacgcacgcgcatgcactcgactctgtccataattgctggtgactgtagcggcgtagccatgtgtatcgtattcgagcttgagcacaaaagcggcattaatttttggccgacttttctcgctggagtgtagacctcgacatgtctggagttgtctccgggttcgtaggaactgtgctttgctcttagcctaatcagaacgggttggcgaggtcgaaagtccgaatatccttttgcagttttgcagtgttcgcatgatgctgattaattcatttaattggctagtaaccgagcaagaaatggaacgtgtaagaaattgaagttgctgaattcagctaggtagagtgtagattatgtggttttcagggccagagtcaaaagttggtacgaaagttgggacggtgcctctgagatcgtgattgtttaattagggttttgtaccattactaaatgctctcaacatagtgctcgcggaaactgcgaagtggcaggcagatctctccttttacaacccactatccaaaataaatataaataaataaaatcacgtttatttggcagatggcactcttgctcttcgacgtgatctgtggctgcggcaaggatacaatgattgagaggtaacacagtgcagttcatatcggtgctgttttatcttgaaacctgcagctccattgataattgctgtgaacaagcagccatttgggccaatctcgcacagaagtgtactggttaacttgacatgaacgccagagtacaagttgaggaggttgccatatgctttgggatggtcaagtttgttgcaaggtttcagtgcgccacgtcacagaaagcaaggatatgcttgcgcatacattaggccgttttgatcgcctatcttctcaataatatgagaaatgaataatgaattgcttagccttgacgcataaggaacgaaacggcatcaggaatagctttattttgcattttgcgtcatgctgtataagttacagactttgatgtgcataccattttaacagtctttggcttcatttaacatacggagcatgttcaaggtttatcgggtagaagtactacttcactgttggctgtcaaggatatcctgacgagacagaactggtaccggagtaatcagcgtcccaccagcaggtactgatcgctgaatccactgttcattgatatgatcaagatgtacagccgcaagatcgctatcgatcagaaatgtggcagctcacgttattggctgatagaatttgcaagattgtgttacaatcgcggcaccgacagtggtcttgcaaagttgcacaccttcccaccacccacgcaaaagattttaacaaccgtagagaatgttaaagatcagattgaaaatccttgacaatgcttgtggttacagcgatacaggcatcggccggctcacgcaagtcaaggatagtacacgtagtaacagcaaatctgcagagtacttactacatgttagccagtgtaagcaaacagacctgaacattgaggggcggcaagcaagaaaaaaaaagaagtcaaatcatcgttcttccaccattatgcttgggagcaggaaacaacatacagataccacatggcgcaagctaactgccagttacaactgaggagaatcatgtcgctaacttggagttccgaccttcccacacgatttttacaaacaaagatgctgaacactgcatataggtagtaccatcactataaccaaacttcctgactggcaataaccactaatcttcctagcaatcaaccaatctcaatgcacaacttgactcaaactggcccagctgatctgaagaatcccaggcaaaagcagtttaacagcacaaccatgaaagattcattttcccaacaacgaactgctagccgtctcgagatctgtcttgcagttctctctgaattcctttaacttcacaagagatgaatgctgaatgtaagaaattttttgaggttagcacataatcaaatattggcaatacagttcatcagtcaagtaagggaagttacattgacgtcaaacttagaaaaggtgtagaaaacatagtacatgattgatcataaaaccatacaacaatatgaatactggaactctgtcctatagcttgatgaacaatatagtacatgatggataccagaatcaatgaagttccgataacagaaaatcatgcaaggcactgaatgtaatattaatttatgatttgcaccaagtcaaatgctcatggtactccaagaccatagtcaccaaagtatttggagttacttttcatgaagacaccacagcaacaaaataaaatatttagtgctccatagaggaccaaagcccccctgccccaaacagacacaagcggaaaaaaaaaggtgctggtacacataaactagtttcacaacctttatttaattaaacaacgaattcacaaatgccttttacattatggataaaatcagaacagagcccttcgcacccaaagtatcacaacctccattgcacaggaacggagaaacctacagctagcccaaaaaggcccttgaattttttttgggttaattagatccatgctattataactttcacggttttgaaatatgccattacaatccaagtatttggaattataccattataacttcagggttatttgatatatatcactacttaccccttcaacccatattctaattttttggacgaaattacccctttcttcttcctccaatccttcctctcttgagcaagccgggatcagtggaggaggagctgagcaggtcctaagtgcatgtccacaagctccttgtccatggcgcattgcacaaccgagaagtttcctccagtatcagaaaagcagcacactgaatcctacaaatgttgctcctcttcatcgatggcagattggaaatttgatttccccaaactggctgtgtagctcggcacacagcctgcagccatggcgctccgtcgccactgccgcttgaagagagagagagagagcatgcacgtctcctccacatcatcgggttggcgaagacaggcccaaccccatcgccggctacaccacctccatgaccacgaccatggagatgtcagaggccaccacgaacgtgctctccgccacctactggatgctcagcgaccctgtgcagcaccagtgtcacaaaccgtcgctcgtcgagcacccagtgtcacagaccgtcactcggcagtgtggcagccccagccactgcggcgagcagggagagcaggagacaggttgaccgccgggggcctcgaactgctgtcgtcaatgctccgagctgtagctcgccagccaccagatccagaggatgaacagaagagagagagggagaggagatgaaggaagaaaataagggcaatttcatctataaaaaatacaatatgtgttgaaggggtaagtagtggtatttatcaaataaccctaaagttataatggtatagttccaaatagttaaattataatggcatatttcaaaaccatgaaaattataatggaacagatctaattaaccttttttttaatgacagaaggggccattgtcatattgaagatagcagcgcagtcaactaattccattttgcactccgggcatgttcacttcattgccaaaaaaaccttaccaccaaatattggtaaagtaaggtgggggtgcctccgtggctagtgtttgctttgataccttaccaaaatttgggagtagttttgagagtagaaagttctagaattaccaaaaattagtagggttatgttggcaatggtatgttcagttccttgccttactaaaccctccattttagtaaacagtaatgttttctgctgatcacatcatatatttttctaagggacctaataatgaattctaaaccattgagcatcacatggagtaatgagcaaatgatccttccaaatttactggcgcgtacaaacagctagtagatccatattaaatacactgtatcaaacacaacatttttgcaaataatctcaggtatgctttaaacattgatgccaagcaaatgcccgtacaacattgaatatgccaggaagttcgggggtgataaagaaacttacaagctgtgcgctctcacggataaggacattttctgtatgaaggaagagtgatctttgctgttgatatagctcaaactccatctctgcagcccgtttcaagttgtatctgcctgcattaacagaatattcatctccttggcttctcttgcccagcaatctagcgaactttatgctcttcttcaatgctaaaagggtaagttttcagagattgaatcaacattagtgagatgatcagtagtggcctacatcatctatatgtagaaaaggaaatgtgctgcatttgcaaagacataccagcaagccgtccccttgtgtcctgataatggagatcggtccacatgaatgcagctattttgtacaagaaaacagaggttaggtgtacattcacctagcatcatgatgacgtggaaaacatatcttgaaggaagaaataaatgcaaacatacccttaagacagaaagaacaagcacacgacttagtggtatcgtcattttccagttcactatttcccagtgaatggtgatggacatcggaacatggcatgtcatcacaacctgttgtgaagtccagtgaagatagtggcttctgattccctgatgatccagccatctcctcttgagtaagacattcaccatcattagttgccgttttagtactatctctggtatatgccaagtattcactatccatgtcatcatcatcatcttcttcacagccaccttctgattccagcgaagactcctgctccttatcatgcaagccagatgagcctaatgacatggcacaactcctcatgtcatcggattccttggatagcaacacagctgcctcagcagccatgtgctgcatcttagtttcccgaaaaattgagggcctcattaaattctctttggcaatactatcaaaaaggggcaatgtgtttcgtgtcgctccaccacttgcttttgcagtttcatcaaactcttttcttggctcaacagccttttcaacccggacaatcttgattccacctgcacttttctccaaattcgatggggctgggcgcttgccaaggacatttgttaaatctccaaaggggcggcgaccactaccttgagcgttttcacccattgcaacttccaaattcactctggtcggctaagtggatagcaaaatcttcaccaccaaccttgtaaaacagaaatctgcggacataatcagaaacaaaagacactgtaagcgctgtattcagctgtcaacatagtttatatccaaaataaaggctaggttttctggatcattaaaacagttggatctggcctatagatgaggtgagcgaagttcatataattggacattacgagaaaattagagctcgtgcttgccatagtgtctattagatgtgaacttcaacgagatcgagacctctctgatacagaatcctcccaatctcgccaccgaccaagtcaaggatcaaaagcgaacaatgcaggtacgacataaatcaacctcaaactcctcatagactagagagaaaataggttaggtttcgccccttttacatcaccattccggatgtaaacagctgaagcctcaatccatggagaggatttagcgcaccatttcggatgtaaacagctgaagcctcaatccatggagaggatttcgctaaaagctgaatccaccagaaggctatcacaatgagccaacagggattccgtccgccgcgcaaactagaccgccagaaaccgatccggggggggaggaggaaatcccgcgggatcctacccacccctgcgccgccagaagcggcaagtgaagacggcggcgatgcgagaagggaggaggggggagggcggcgactggggagcacaaacctcgccgacgcgagacggccgcctttcccccggttcgccccgcgggagcggcggcgcgggcgagagaagcaggagaggagaggggagaaggaatggtggggttagtagtaggaggttttattccgagacgcggcccgcggtggagaggagcgaaaaaatggagcgggcgggcggcgggggcgaggggcgaggggcgagggatgggatcccccgcgcgcgcgctcgcgttcggaatttgggccgcgcgcgtcgcggtcggcgcgtgacggggcggggaggcgcgtggctccggcgcgcttttggagttcgtcgcacagtgacacgtggtgggtggacgattcggtgtgttggcgatgccgaggcgaacggcgttgaacaggcctggactagtcgattggcttctgggttgggccgttagtgggctaagaaatataggaggagtgagcattcggatagatgtcgtcctcctttcactggatagatagaagggtatatctaaacgaacttttgattagtttttctttcaaaagctttcaaatttttagtgtatttacgttgtaacttatatataacttagatataataattagtcaggaaaaacatgttagacatagtggccagcccatcaatcgcacttttgttgcacagattgagtttgaatctgaagcaccgcatgcataaataattttcctcacatgcatgtaagaatctcgagacaattcaatggacacaaatttaaaagttggtagaaaactaaaaccgtcggaagactttttgcaaatttgagataggatggcttagaggcagagcatatattataagaacctaagcgctagcctcaacatgttacatagggcttgtttggtttgctaccatgccaaaccataggcaaattttggtaataccaaatgttttggcaacttatgtgtcttattagtatattttggtagcaaaccaaacactagccaaactactattcaaaatgccaacaatttgatagagcacatttcagcatcaaaccaaaatggcccataagcttacgctatgatgggtagaagagagaaagtatgagagataaaagaagacacctcttatacaagagatagtcgacaaaagggaggaagatgaagattatattggacaaacaagtattgggctaatatattagagttaatataaaggtaatttatttgtaaatgattacctttatatccatgattagatgcacatgaacaagagagcaaacacccctattagtataaacccactactttaggctgtgtttagttccacgctaaaattggaagtttgaagaaattaaaacgatgtgatggaaaagttggaagtttgtgtgtgtaggaaattttgatgcgacaaaaaagttgaaagtttgaagaaaaaagttggaatctaaacagggccttactccaaatattacccatgtcagcaaaagtcattgtttaatcaatgcactgttatttaaattattatttttctccttgttccgtgcactctctcctgacacaagtggaattgctcaaacctgcattggagtgcaagtgcagccagcgcgtaaacaatcgtccgatgatatagggttgattttgtttgataccctaccataccctaccaaaccattggtagtgctaaatcttgagcacgttttagcactaccaattaccaatgttttggtagagttggactatatgggttgtattagctatggcaaatattggcatcgatccaaacatctagtataaagtactatttaatttgccaactttttggtatgacaagttttggcaccaaaccaaaacaacccatactctctcaccttctaactcaccactaaaactggtgtggcttattgtcctaggctgcgttcgttctagcttgtttccaactcctctcacttgttttcagcgtacacgctcttaaaaaagtttatatttgtaagttgcttaaaaaaatcatatgcgagaatatacgaaaagcctaggatcaatattcaaattgttgcaagttgcaagttgtttcaagttgcttaaaaaatatacgaaaagtaagttttctgggagatttggaaagaaaaaaacgcaagaattttcaggcaacttgcaaccaccccaacggccattctatccagaattaaggaggaagcaagactttggatcacggttggcgcaaagccgctagctgagttcctcctttggaagagtaggcttttctcggtctgggaggaccttaaacttacttttcgtatattttttaaccctctctatcaacatacgagttaatccttttgcctcttgttttttttttaaaaaaaaactgttgtggcaggtttatagttattgtatctactcttacagatttgcttttttacagtaatcttcttttatagtatcctgctgcaacgcatgatgcaaagttgcataccgcagacaacgattcatactctattcatccttaaaaaacttttgggaatgcaacaaatgcttggccgtgtttaattctttgcccaaaattttttttaagtatacggacacatatttaaagtattaaatatagactaatagcaaaacaaattacaaattccatctgtaaactgcgagacgaatttattaagcctaattaatccgtcattaacaaatatttactatagcatcacgttatcaaatcatagcacaattaggctcaaaagattcgtctcgcaatttacatgcaaacaacgcaattggttttttcgtccacatttaatatccatgcatgtgtccaaatatttgatgtgacgtttttggccaaaaatttttttggcatctaaacacaccactcttgttcaaatttatctgtacgagttgattattttctttttacagtttgattcatgaagtccgaaacagcaaacttgactagtcagctgttgatgcgaaaaaaaaacacacacacactggcctgggagatctgcttagctccagggcaggaccaaaggttgatgagatgcgggcgtgccagtcaatttgatcccgcaactgacaagatatacaaatagcataccaataagccagtcggctgtcaagccgatggagtaattacagtcgatgccgatatcagccgatagcggtagggttttgagctatcagctatgtgtttgatgtagaatctgatacttgatgtaaataatgatatatatacaatcggctgatgatgatgtaataaaataacaatataatcaagtagaaaccaatcggcttataatgatatgataggacaagcatggatctgaatgttaaagcgtacatcggctggaggttcgatgtcataaaattcacaagattagataaacaatgaaacctttgttgcaatcggctaaatccaacttatatgcaatccttgtaagccgatgcaacgtccagatacctcgtcggctaaaatgtcacgcccagaaatttagcccaaatttccagactattttgtgtattaaatccctgtccaggaccagtcagggtacacaaaacgacaagtaataaacagttccaaacgtaaataaagcgtaaaatacttacagaagaggcacttagtcctcacaccgaaacaaaagcagcagcagcggaaaaaggcaatcctagcggggcttcagctccactccacaggcaaaactcaactggggtctgagccttggtcctctaactccatcttcagctcagaagcactacacttctgaaaagggggaataatagcaagactgagtacaaccaccgtactcagcaagccacaccaacgatgcagacgtgcaaggggatacaaggaggggtttgtggctatttgcataaaggcagttgtaaaacatttcattgagcaaaacagtaaaactgtgagtaattaaagtaacattaaatctccactgatcaacgctacaccacgttgaacaggcccaaccaacccacctggactacagtgcattgggtcgatttaaaaagatgggactaatcacggtgaatctggtcgaccgcccataaccgcgggcacggctattcgaatagttttactctggccagaggtgtacaactgtacccacaagacacagccccacgacacgtttccgtgcgccgacatgccaccacgacataccggaaagaggccgtgacaggacccttcacataaccccctctagccaagcacaccacacctcaggtttcacccccatccccagcgggcaacgggcagtcccctctcgtgcctaggtgaatccggaagtgacagaggccgtcgcagggcccgccccgctccatcacgcccacccttgcctggatgcgtcgactagaggaaagctacactacaagcccagccgttgcccacgctggcttgtggtaagtacgataagttcttccagggcatcccgcgaaccggtccttaactgccatgggtgcgaccagcaaaaccatgcacccacagcccaccattcagtcgtattttaatcggataattacgaccatgaagcatggccagatgtctcgagcacgcagctcactctgataccaaaaaggtctaatattgtaattatcccatcaactgagctagtggtaattaagcatggctaagcatatagttctagctaatcacataagtaacatgagctagtcgatttattacccaaggttgacaaaggatagatatcaagtaaacgtggcacaagcgagcagataggtaaaccctgatcccgtgtaattagcaaaacatgcatgtttatttgtaaacagtaaaacatttgtaaattaggatcaaaatgctcaaggggaatgtgtgacttgccttgcttcttcacttggatcttctgaactcttatccttgcgaacgcgatcttccgaaacgacgggaactacacgctggcacgcaaaacgaggaaaaactctaataaaaaccaagaaaatagtacataaaaactaaacaaacatgtagagatcaattttagatgaattttgcaagttgaatggctcaattcggagttcgaatgaattagatatgaattttagaagttttgagccatttaaatgaatttctataattattcacgaattattgcgcaattattatttattttacaaaggaaatggacctcgctgacgtcatcaaaggggaggggcggcgccggcaagcgggccccaccggtcagcggcacaagggcgccggtccaccgtggaccgggaccaccgaggcggtccaccgccggtccacgggaaccgacggcccggatcggcccaaagccgatcggacggccacgtggcggcgcggctggggcacgggcacggcacagccggcctggtcgagcgatagcgcgcggcggcgtgcggccagacgaccgccggcgacagcggcgcgtcgcggcagcgggcacggggagcggcggaggagggaaaaaaggagaagggacggtggggattctcaccgaggacggcgacggcgagacgaccacagggaggcggctggcggcggaaaggatggcggcgtctggcacgagaggcggcgggaacggcgttccggcgacacccgaccatggcggagacgcggccgagggccggcggggccctcgagatgacgaagccggaggaggtggcggcacaagtcggcgtcgaccggagaggcggcgcgacgcggctggactcggcggtggcggcggagagagatggtgaacgcggcggcggcgttccaggggcagggaggggaaacggagtaggggccggggtgcggcgaggaacggcgatgccgatggcggtggtagcgcagcgcggcagcgacgggagcggtggtggcgcgcgactggaggtgacgagaggcggctgcggctcgggtgcacggtggatgtggtgtttcggcggagttttgtggaaatggagcggtggccggtgtgcggcaaagagcggcggagccgacggtgcaagcggcgcggcgcggcggctacagcgacggcggcgcgcagccggagcttgccggaaagcggcagagcgtgggagcaacgaggggagagcggtagggagtgtagcgggttcgggaaaattggggaaaagggggaggatggcacggggatcatttttataggctcggggaggagaaatcgtggccggacgtggcggatttgaagcggcaacggccggcgacgtgggtgacatcgtgggcgaagtggggctcgattcggcgccaaaaattggggaaaagcgggggaggaggtggaggagaggggtggttcccggtcccatgcgagagagggctcgaggaggccgggaatggtggcgacgtgggcggttttcggcggccatggcggcaacggcagttgccggcctgaggttggggatgacaggtgggcccatgggtcccacctgtcggccaaagaggagagggaggccggctggggacgcaaagtagacttcggggaggagagggccgagcggcgagctgggccgagggagagagagagcccgagaggaggagggggattgggccggggcggcccaaaaacaaagacggggaaaaaaaattatttgttttctttttattttaattgatgcaatgatctttgtgctattaaaactatctcttgagctccgaaaattcactagaaatttcagagagtattttagggcacaaagaatattgcgaaatattcccggccaaagatttttttaaaggaaatttttaatttcctctataatttcacttgattaaattgatttaacttttaatataatttctagaaatgcattattaattgatttttattcccgaacgaaaatcggggcgttacataaaacccctatgaaacccttgttggcagtcaaaaggcaagctagggattatggttataaacacgacttagtagatcaaacttaactgatgctacactaagtatgaaaagaaacacaatatctaggcaatcaagccgttgactggtttttaaggtggtaaatgccttagctaatctaatctaatatagttaaacaatttagccaataccggcagaaaccctaaagcgagagacaaccgatagggctaaattgagatactaagactagattaactaagacatatgataaataggcaggcaaatatatcatccaaaccagagcaatccaagagattgaatgtgctgatgcagccttgaacgacgccgacgtagatgatacaattgtccggggcggtggaacattggacttaccccttcgccggagatcggaaagcgatgcagtgccgcgtcaggtgccaagtcccgccggacgatgaaatagagtagaaaagataaaaggtggtgatgcgctgaattgtattgatcgtggagataaaatacaatggccctggtgtacatatttatacccatggggagatactagtccttgtaatccttgtagaacaagaaagaagctttcctaaagataaaaggaaaacataaagtccttataggatactaaacacactaaactaataaactattcctaattaatagataacttaccataccgcatcctacttgaactcggtcacttctggataagcttcctttaatagattaatttccttaaccgaatatagcaggaatccgactattggtgatgtgataattctcttaggggaataccaaatttcactgttaacatcagcgcaaaagatactaagggcccatttgaatcgtaagaatgaaaaaaactggggaatagaataaacatatgattctaataggaatgtaagtgtaaagcagatgattgcaaaacacagaaaaaacataagaatagtcgtttgattggaccacaggaaaaatacaggaatcggatgagagagatagactcaaaggatttttactaagaggttgaacctcatgctaactttcctcaaaacctacatgcattaagccataaatcctttaatcctttgcggaatcgctaattcgcgctgacgcgccagatacttatctcgctcgcccgcggcaggccaactgcgcatgcatgcatgcacctttgcatccacccatgcattacacacacatgcatgcaccttggtcccacacatgcatgtgccatggcgtacacccagcgcatgcattacacacgcatgcatgcatatataggatctttctttcttttttttcatcttattaggatgtagtgaaagttatccaaatttctattataagatatttttattagaaaatactttttataattcaaatttaaaatctcgagttgaaagttttcaaatctgagttaaaagtattcaaatctgagttgaaagtttccaaatctcgagttgaaagttttcaaatctgagttaaaagtattctaatctgagttgaaagtttccaaatatcgagttgaaagttttcaaattttattgtaaaatttaaattcaagtagaaaataattttaaaatttgagttgaaaggttttaaaatttgattttaaagtttaaatcttaagtcgaaagttttcgaatctaacttgaaagttttcgatttattagaaaaaataaaaagttctcttaggtactaattataattaacactaatcactaatcacattatcattagtgctaattggagtatatggttagcgacgggcgcagcgtacgcgtcggcgggtgcgcgcgacttctgctcgcgacgcgcgttaggaacggcacatcagacaaacagttcaattaacgccctggccatgcatgaccggtcaatagatcacctccctgtacaacggcccggcccgcatagttcggtcacgttgacagctagctgtactgaacgtctgtacctgtactcgcatgagcaacgccacccgtgcacgacaggcccgccggctgcggcagcacgaccggcacgcgacacgagcgctcgcggcggcccccctccctgccgctgccgctgccgctgccgcccgcgaccatcggtacacgggacggccatccaccacgttcctgtcgctgatggcgaccgctcgtcttaaaagccctcaacacacgacgcctttggcctttccctctcccacacacgctactctctctttattgccacgcccgcgcacgctgcttctgccgctgcacctcggatgggacacatgcctcgaccccccgccgctacgagttccgaggaggagatcaagaaggaggtggcggccgtggacgtcgtcgtcgccgcaccggacgacgatgtggccgccgatcgggaggaggaggaggaacagaagaagaggaagcggaggaaggagaagaagaagaggaggaggagggcgccgagcgaggaggaggaggccgcgctgaggtccgtgctccgctgggcgcgccgcggcgaagcgggcgatgaggaggcggacgggcagcgccccgctgcgaccgggaggcggcggccgcgcgtcgcggttgagctgcacgcgcactcgacgtgcagcgacggctcgctctcacccgcggcgctcgtccagcgcgcgcaccgcaatggggtaagcagtaagcacagcaccgaaatgcccgcgaacacgaacgatctcggtcacgcttgcactcgtcgtcaccgcaaatcgtcgcgtttcctaacgctaatgcccttgtgatcagcgcaggtgaaagtactcgcgctaactgaccacgacaccatggccggcgtccccgaggccatcgaatctgcgaagcagtgctccatcaggatcatacccggtgtcgagataagcgccatgtactcaccaaggtaaccaaaacatcgtactctctagtctctaccgccttgcacatacacagtcctgcatgtctgatcattgccgtcttgccgatgtcgttgatcttaatcagtgatggaataggagccgaggaacccgtccatattctcgcgtactacggtagtctgggccctgcaaaaccacaagaactcgataggtttctcggtagcatcagggatggccgctatacccgtgcgaaggggatgctgctgaagcttcggagcctcgacatgcccatggagctcgaagacgtgtgcaccattgcaggggatggagtggctccaggccggttgcacgtggctcgcgccatggtagaagctggatacgttgagaacattaggcaagcttttagcaggtacttgtatgacggtggacctgcttatgccacgtgagtatcctcctaatttgtccatgatcaatgtatgtctttgcaactatacttatcaggtgagtagtttgatttactcgtggtgtggacgtgtgttttttcttctgttcatttgcagtggcaatgaaccagcaggggagtctgtggtgcaattagtttgtagaaatgggggtgtggcagttttagctcatccatgggcactgaaaaatcctgtggctgtgataaaggatttgaaggctgctggcttgcatggcattgaggtttacagaagcgatggcaagctatcaggtatgaacaaagatgctcgtaaaaataaactcttttaatcactcgagtggaactttgattcgatggaataaccggggactgtatcttcgacaggattaagtgatctggcagatacatatggtcttctgaagattggtggttcagactaccatggacgagacgacaaggatgaacctgacgtaggaagtgttgatcttccggtcttggctgtttctggatttcttgatgcagctcaaccaatctggcacaatgctaccaaggaaattctggcaaatattactgaaagggcacctaatggctcaaagggactccaaaggactaactctgcaaaagatttatgtaacttgcgtcttctttcttcagacctggaggtaacagattctacggaggttgaggtcctccaaacagaactttcagatgttgtcctcagtaactgaggaccataagacacatattgaacaatgagcagaaatcaccatccctctagaccctctccagtcacattggctggtctggagcagttcaatctaaactgcaattcaatctgctcatattcttggagagaatacaaattgttgcatgtgacgccgttttatattattggctggctggattggaaaagtttcaaacggtaagagttgatcatttgcatattacgtaaaatcattttaggatatctgtaacatttcgtgcacttttttttcatcacttctccaaagtccaaatgctaacaaataaagttggaagtgttatatggacatgggtgcaagcgtatattatatcatctactccctccgtcccaaaaaaagacgaaccctgagtttccgtgtccaacgtttgaccgtccatcttatttgaaaaaaatatgaaaaaaattaaaaagataagtcacacataaagtattaatcatgttttatcatctaacaacaatgaaagtactaattataaaaaaatttcatataagatggacagtcaaacgttggacatggaaactcaggtttgtctttttttttgggacggagggagtacgcacttattttgcatatttgtagagctaagatcatttttcaattaatggttgtgtgtctaacggtataggctggagatataacccatttacttattatctcaaactaaaaaaagatcgttttctactaattgtctgcggatagtttgttttatcaatttccagcgttttatggaatatagagatctgagctttgagagcttccgagttcaaatttcagaaagaatattctgccgcttaagcgtgccatcttccgtttgtgccaattttgcagcccattctgatagattccatggaccggcctatgtaagcataacagcacgtgcatcaaataaggcttggccactgggccctgtgaaacgctcatgatgcgcacgatatatagatgaatgaattttatacattatagaaatgatagaaatgatagatgtatatgtttgaataatgtgaaaataatatgtaaataataattttacattaattgcatattgaattttaaaaatacaataaagttgtaaataatatgtcatgtttacatgatacttaaaataccctagataataaattgctagtgtatgatgatgtgatacacttgcacgtgatttaaaaaactctagataataattgctatttagtgatgatgtgacacacttgcatgtgaagctttagaaattagtgggcatcaactttatactaaaatactgtatgattttgtgtcgcgttagattgggttgtacttgtactagtcaaattcattacaacccaattcagttaacaaaagaatatgagcagcaactatatccagttaactgaattcgtttgctaactgaattggaaatgaatgtgtgtttattatataattttagtccaattatactgtcagtagaaaaaaatatacaatcaataattaagatgatagtataaatagatatgattgattaaactataaatgatttagattgatttactgatagtagagactagagagaacttgaaagcgtcgaaagcgcaagcacgaatttttactctagtatctaaatcacattaacctttttactcatttctaaacgtggcataaaatgtcagtagttcacattgcggcgtaaagcccctttcacccttttccccgtgaaagaataaaaaggaactgcatggcgatcttctggggcccaaccatggggaccgccggcgacgcgactgtcggtcataaaaggaggaatatatcccaaggagtaataatgctagagatcatcagttcatcacaatcacataaggataaactactactgtcatggcaggctaacacattatacctggtaatttcaggacataattctagagaagatgggtcgtgattgctggaaatattccagagagattgaaggatcccatcgcaattcacaattcacgggtacggttgaaacacttgaaacgtttctttcttgagctgtagatggacttcaagaacaggttcccggagtgatttgatcgatgctggcaaattaacaaatgtgtgattctttaagagtaagagagatttcaaatagccatttgtaaactttgtttcttctccgagaagaattctttgttagtttttgaaaacttcgcgagaataaatcttgcaagcaaggaagtagacttcttgcaaaaccagcatcattcatcttagcgtaatgaactttacaagatccgaagcttgtaaagtggagatgatgttctcccttttctgtgccatattcacatataatttgacgctgtagagatttgtgctccttttatttcttggaacagatgctcctttcagacatgcaaatctcaaaacaagtacacgtgattcatccgctaaggttttcaattccaggacattgcttttaatggatgttaatgcatttttcttttgtgggggacgtgtttgcagttcattttttaaaactacaaaaataaaaagacgctatctgcagactgatggaaaccatgtgcgccatctgtggtttgcagctgaaaagatgatacggtaccaatctcaccagcctctttggaaacacattggcaaacgcaccctaatgatggatctaactgccatcatgttgctaactgctcatggactgcagctttaacaaatcgcagagtcaaggaactgaaagcacaactgtagttgccatcgttacgaatagctcctttattttacgaaatgtggataatttgttatatatttgtctaaaacatactccctccttaaaaaacttcttgtgacgatgttaacataagcctataactagatacataactagaagttaatttttacgcaccgagaaagtattattattgttgaaaatatagtcatatatcgtcatattttaatccaaaatattaagacaataatcatgacatgaacaatgtggggtgatctagtgataaaataaaacataaataggagcatgcttaagatagaataagcatcatcatcatacatagaacgcaatagcattgtgactaacagaaatatcaaaaaccgaaataacaatagcattgtgactaacagaaatatcaaaaaccgaaataacagtagagggttataccctgtgaaagtctctccaatggattgtgaggcagaactacctccattggtgttatcgatcggtgcaccagctcccgggcagacatgggtgatgcagacgaacaatcgaaaacgaacagaggacgaggagcagtcgtgcagaagcactccccaaaaacccgcctacccggtacagatctcaggcgaaggtgtagttccggaggccctgctcgttccgatctcttgtgcgcgcaagcgatcagaaccggtgaagcagtagcagcacaggcagcggcgcgaggaggaggaagaaccagtgtttggaaagtaaccaacctcggcccggccggccagctcggctcggcgcgcgcgcgtggctttctgatccccacctcaaccggtaaacagggagcctccaataactccctatttaagttgagatactcctcttttaattcccagggtggtattattatccttaacatttattatggccccttgagatttaatagaaaaatcgggcctagcccatttattctaacaattattcactaaattatagctatggacaatctatttggatattgagataaattaaacattttgagaaacaaacttaatagatagtttgaatgatgtggccagaaaagagatgtatagacagtcccaaagacggaattgcttgagaaaccgttcttttgatagcatggagcaaataatcggtgaataggccgaaaataacatgtagtcagagcggtggctttgctgcacattgtataaagagggtctgctcgaaattaagttcacacacgcaaagtaagtctgatgaagattaaattcacacatacaaaagtgagaaaactattagcgcgtggttaataaaattttaattattataaaattgaacatggatttatttgatatttcagagtcaattatatatatgaagttataaaacatactccctccgggctaataatacttatcgttttagataagggtgaagtcaaactttagaatctttaatcatgaatcatttttaaaatatttatcttttaaatatggtgactacatgtataaattaatcttaaaaaatactttaataaaatcatatatttgttaacacttttatacatattatagtagaaaataatggtgaaaattattttttggagaccgtgctcatgtttaaaagataagtattatcaatccggagggagtatcgtttagtaatttgaaaaacgtgcaaacagaaataagatagaatctgtatcttaattgttctgttaatcggaaaagaacgggaactatccatgattgttttgctatgatccagtccagtctacctacaagtcacaaattaaatcaccatggagactcgggctcgcaggacacaagagactatcaggaggtaagcgggcaggagcatgtgcctgcacgctgcacagtttctctgaagatctgaagcaggagtgcgtgcagttacttctactgttactagcctacccattatcagtattctgtcctcgggtagctgaagtattgaagagggcagacaggagctcatgctttcacgggcacaactacgactacaccactactgtccctttgggctcttcctgtatgggaggaagatggtggagcactagcgagtagcgtgccatggcgcagaagccgcgtttcaggactcgcatcttggaggtgccaagtcaaaaactagatgaactcgcatgatagtatggcactatcacccgaccaccaaccctgtaaaaacaataagaaatgccaatggagatagagatctactcctattatgtaaaacataattgttacgtgaagcatttcctattttggtagttacttcacaattaggaaaatgctatatgtactaatcttattttaataaactcttactaacattgacatgtcatgttgttagcacacctgattttcttttaatgtccgtgtagttaaggcttgtttagtttcctaaaaacttttctcaaaaatatcacatcgaatatttggacacatatattgagtactaaaaatagataaaaagaaaaactaattgcacaattgggaggaaaattgcaagacgaatcttttgagcctaattagtccatggttagccataagtgctataataatccacatgtactaatgacggattaattaggctcaaaaattcgtctcgtggtttccaggcgagttatgaaattagttttttcatttgtgtccgaaaaccccttccgacatccagtcaaacgtccaatataacatccaaaaattttcatttcaccaactaaacagggcctaaattaaatggccgtgattattgtttgtgacagtttttaagaatatttaagaatgcaatactgagagagagggaaaatactctctcgccacacacatctcacaaatttttgttgttttccatgccattttacggggaaacgattccaaactcttgattgaatattttccattttttgcatgtcgtttatatatttataaatatataaaaaatttaacaaaatagattaatacgtgaaagatcgttccacaaatatgtagggtaaaatttaacttctaagtaaaaaaataaatttaattgtacatatacattaactatagttttacttgttcttctcattgcaacttgtaaaagttgaatttattaatttgcatgtttgtgaagtgatatatcacatactattaatctatcatctcatttattttatttttataactatttcaataacttactaccgcatttgtttaatagatgatgccataaactttaggtttgaccattcgtcttattcataaaaaatacataattataatttattttatcgtgagtttttttatcactcaaattactcaggcatgatttacatatattatacgtttgaaaaaactttttgaacaatacgaatggtcacatatgtgtttaaaagttaatagcattatatattaaaaaacagaataaatataaacaattaggatatctcttcgatagtttaaaatccactcactttaagagaaaacgattctaaactccggagaaccattgattgcgtcggcgatcaccgccgatccacacacgtccacatcgtccatattgagtgcgtgatcaggccgccccgtatcgcgtcgcgtggagtagaagggagctttccattaggccccgcgtctttttgactcgggcgatgctaatcacgcacggttagccaacaattgcttggagcattgcccatttcttctcttgtgctgctctccctcatcacctcataccttattatagatggaacatgactgctcttttctcgtattcgaattatactatacttttcgtttggcatatgaacatcggaaggagttttgctcagataagataaccaaccattcgctgaacctgaaccctctagtcaaagagggatcgtagcacgtattttcagctacgtgaagcagaagcacgccaatagccgacagaaattcgcgtacgtgtaaagctggtagataacctgattggtgaggacgagagctcgccaactgcggcgcgctggtgtgcgtgcgtgaacaagatgggtgcggtgaaaaaaggcgtcgaggaaaacaccaaaaattgacgtgaatcgaatgattgggggcgcggcacgcgcatcagaattggattggattccaggggaggggaggagctcacctacacaaaaatgctcgccgtctcgtaccaccacccgtccaccacttgccgccatccaccacccaaaaaaaaaaattcctcctcttcacatccatccatccaatgatccaacgcaaccccaatatctgcctctaatcgacgcaattactgtactagtataggagttcttagttaggttaattttggaaggactagtgagtgtttttgtcgttgagctagctcatttcggagctccattgtccacaactttgtaaattggagagctcacacaggactaattaaacaagtatatcttaattaactagtgtctgatggagattagttttgcgtcgaaatgatgcagcagtttttttagtgcccgatgcctatcttctcgatcagcagcgctcctagattaattcgagggatatctttgattagtgagttcggtagtgggagacgctagcattcgttgtatatatctctatataggctgatgcaagtacagtacttgcagctacttctattttgcaattccatgatccagatgcttctggcagttcattagcccctcgtcttgaccttgcgtttccacacataaatacaacgctacagccagaaaaatgtcacatctcatcttggctacgcatggatcgattaatttacattgatgcacacataatcattactcagagcgaggttacttgatagccctgaattggtgaccaataattgttgttaagtactatatcaccttgctttcgatctcatccactaatccgtggcatggacgagaccactcgatcccgtggtgatcggtggtcgtagatcggtctgactattcgtgcgtaaacatcaagcgcaactttctttcgtgccaccgtaagccacccggaacgaacaatttttcgtcctcctcctcctgtcctgtcctgcagccgcgaggcgatcgacgatagatgacccgtgccgcgcgaacgagccgagcacaccgggcgtgcgcggaaatgctacggttttcttgccaaaaacgcggagatccccgtgcgatcgtcgcggcccaccacctcgcgcgcgcgcgtcgttgcgttttttttttgcttcgcggcctcgcgagacgctgacctcgcgcgggcgcggccgggaggatccatcgaaaacgaaggcgtcgcgttgcacgacgacgtacgcagcgcttgcccacgtggatcggcatcgatcgtttcgagatctccggctccaaatcggcggggcatctccccgtctcgtatgctctcgtattctcatcaccgatatgcgtgtcaacgtccagctccgtgcccacggttgtgttgctcgcgcgggcgctcaacttgcaccagatttttttgttcgccgggatcgatattagaaggcgctgcaacctgtcgtgcaggttgtgcttgtgtgcttatagtacccttcctatcggggcagattacttggccattctaattttcgacgatttgaagctggtctcgatcagctggtggataatcacaaatgcaggagatggattctaatagctcaaatggacatctacccatttattacatgtcaattagatagttatgaatttttttaaaaaaaattgataagatatatcaatatgtaatatatcactccacagatacacaagtttaaatttaacttctacaagttataacaaatttaattgtaaatatacatatagtaatttgagttttgtttgttatttttgttacaacttgtagaagttgaattttaacttgcatgtttgtggattgatatattacatatttatctattttgttcatatttttttatttttttcataactattttggatgacatgtaaataaacgagtagacatacacttaaactgttaaaatagtttccgcccacatgtggttttatatgtactgtgagaatgtatcgtacgtgtttgactcgtgtaggtttgatttgctagagaaatcgcacggtttggcaaaatcaaggcgtacacatatcgtactccacaatctctccggatgatataagtgtccccgaaattaaagctccgaataggtgtggcgttataatcttcggcaacatcttcccgtttgtgctttaatgtgcccaacacgcatttgcaccctagcttgctgctttttcagtgcataagcaacggattaattaattccctgcttctaacggccttctcttcagcttgcatcatcatgtaatttcagattgaacaggtgaaacattacaatcagcacacttgtatcacgaggattaaactcgaaagtccaaagacaaccacgtacagtacatacagacgcatgaatcagctcattgaaaggttgattgtaaccagcaaagtttgaaaaaactattcacctcgccattttttcctccttatgttgctatccaagaattgatgtttgtaaaattttcaccataagtttttgaccaaaatgcattattgaggggctccctactatacgatcacgtggctgtgttgaccgatggaaaacaatttgccaataataaaatcacggctgtacagcgcttgtaattagacctgcaaataatggcgatataattgaggaggcactagaaatcaataatgtcctttttcatgtctaaatcaatggtgcccgcttctccaataccaagaacagttcaagctcaaattgtttctaccaattcacaccactgtttttcttgtaacgcaacaatagcagttctggatttttttcccccaacccagcgaaagaaacaaggtgattttaaaataagaagaatatattcaagatatggtagtagaggcaaaccatcaaactacgcaaagtaaagctgaaagagaatgaatgaaagaataagaatccaacatatcttaatttacagagtaaatgccagtcattgaatacttttcaaaactgtaatggcctcagatggagaaggcttttagcccttggcgcaatccaaaaggcgaattcccctggacaaagggcagcaaaatttgaagtcaatccagcccaccatcagtccatcaaccaactacaggacgccacgtaagcaaaacacagtgtggcgacgtgcacacccctgtcctgagcacacgtggggcatcctcactggctgcaacttgttacccccgcgtgctacctgccgtggcctgacggcatgggcgaaagctacagcttatttgtactagtaattcacatttcaaaaaaaaaacccttttattttctttttgtatattttgtagagaaagattggcaatgaacagagaggaagagagatgcttgccttcggttgcgttgcgttgcttgcacggccaaagtggcgctatataaaggccatggtgtgaggcctcttcttcctcagagagacgcctcaaccccaccccaagaacaccaaagccacatcccatcccatcccagtccacggtgaggttgagcgatctgaaaaaaatcatcagcgacgagcagcaacaggtttgttctctgaacttctctgatctttttagaagcaggtaacacacaagaaaggtcctgtcccaagaaggtacttctttcgggtttattagatcgaaagaggagttcttgtgcgtacaggttctttctcatcccatcaacttctcctaggaggaacagagatccagagaaccttttttctcttctggattcttgccgatttttaggcttcctttgcttttctaaggccagaaagggttgttttgcaatacccttctagttcatcctctcaaatttttcttctttctattcaaaagctctttctttctttgcaccctttgtttctctacttttattgaggaacagggctgatttttcacttcttgcatccaaaaagcaccccttttttctttcctgtttttaagatttccatacccttgccatcttcatcttctacctccatccagtcctcatggccgcagcaatagacatgtacaagtataacactagcacacaccagatcgcatcctcggatcaggagctcatgaaagcgctcgaaccttttattaggagcgcttcttcttcctccgcttcctccccctgccaccactactactcttcttctccttccatgagccaagattcttacatgcccaccccatcttatcccacttcctctatcacaaccgccgccgccaccaccacctcgtctttctcgcagctacctccgctgtactcttcgcagtatcatgctgcttcacctgcggcgtcggcgacgaacgggccgatggggctgacccacctgggcccagcccagatccagcagatccaggcccagttcttggcccagcagcagcagcagagggccctggccggcgccttccttcggccgcgtggccagccgatgaagcagtccgggtcgccgccgcgcgcggggccgttcgcggcggtcgccggggcggcgcagtcgaagctctaccgcggagtgcggcagcgccactgggggaagtgggtggcggagatccgcctcccgaagaaccggacgcggctgtggctcggcaccttcgacaccgccgaggacgccgcgctcgcctacgacaaggccgccttccgcctccgcggcgacctcgcgcggctcaacttccccaccctccgccgcggcggcgcccacctcgccggcccgctccacgcctccgtcgacgccaagctcaccgccatctgccagtccctcgccacgagctcgtccaagaacacccccgccgagtcagcggcctccgcggcggagccggagtcccccaagtgctcggcgtcgacggaaggggaggactcggtgtccgccggctcccctcctccgcccacgccgctgtcgcccccggtgccggagatggagaagctggacttcacggaggcgccatgggacgagtcggagacattccacctgcgcaagtacccgtcctgggagatcgactgggactcaatcctctcataaacaagcagaagcagctactactagtctattactagtactagtagtagtcttcgtcaagctagagtcactcaactcaactagctgtgtaatcttctctgaattccgtggcttccatggctcggtggcattttagacgtcggccatggctgctgcgagtagcagtaactagtcagtactcagtagtagtaaggtcgttggtattacgtcgtcgtgcaagtgtcgttggtgtactcagtgatctgatctcctggttgagctgccggttgtttttttcacggcgcggccggtcgagaattaagctgtaatcccttgttacatgttggaaattcagtagcttatgtaactatatgtacctttctcacgtgcttgtctgatctatatgtgtgtagttgtgtactctcgagttgcctaatcagttgtcatgccttctgattgtgattattatgtctccgatgctactatgctagcctgcaattgcttaccatcagatactgagctgtgttaatccacatagaaaggttaagttttcattcatctttgaaaaagaattaaactttgatgagcttgtaaagtattcatggctgcgaaaaatagatgccctactaattcatacctctcccggctcttctctcaggctatcagctgttcagatattcagagcagttcagttttttttcactcctgcaacaaaatgatccggccgccatccaccgtgcatcaggcgtaaactgcacacaattgattggaggagccggagcctcagagatgagttcatcgttcgttggcatccaaattcccagctcacctcctgagctgtttcagttaggatgcacacgaaagcgctaacatcaccggggcgtcacaaaaatggcgttttgtttactacaacatggcaatttgcaacggatgcatccggaatctcgccgaaccccatgatgcaagcgcccgactagccgagcttatcctccgaaaacgacatgcgggtcaccccgggccggccagccctcatctcatcccatcggcgtctctactacggccttagccttacccttattcgcccccactacacgcatttctttattaataatccggccatccaagtcgatcgccggtgaaagctaagctaaggaagagcataaagaggccggccggagggaggtgatgagatgaggcatcatatcatgatcgtccattcccaaccaaccttaccctctcctctcctctctatgaacctattttcatccctttgttctcagtaatgcctaattgcacatcactttgcgagggataccagtaatggattaattaaacgggaatgctacgtggcagaaatttggggataaaattttagagatgttggatcattggaaccgcgccaagatttgtgcttgggcttcttctcccctgactccagcgagttctccctatttttcgacaccaatgacaccccccaattctgactggtgacctacagattagggtttggaattggagttgtcacatagatagacctttaatttaagctttatttggttagttccacacctacatctttccaatcacttaatcactttcttgtaggggattaacaaaaacaagccctagcaaaaaaaaaaaaaacctaaaaacctatacatactccaaacaaatctttttaaccgtttgaaactttgatgtaactatataagtagttaaaaaattctagatttactcagagcatatcacgttagcgtttctaaaagttttataagaaaaactctgcaagtgttaacttttccttcataaaagacagtagctttaaaagaaaagtcaaatcgctttaaattacctacacttatattataatcacactttacatttagaaatttacactgtaattagtttatattgttattttctaaatgcacataggattaaacataattattatctattcctacttgaaagagaagataagaaagatagaagcatactcatttttaagagagagaacaatgggaaaaagttattaaaatcaaataaaaatatggtgctatattttaagaaaaaaaataaaatccttttagcatcaacggctttgctttcataggggagcaactgcagcggccagcggccagaggccactcgtacatagctccagccaaatcctccctgtttataacaactaagcacacctgttaattactcagcacctttattctcccttgagcatcagaagaatgcggcaaggaacacgcaaaaaacgcacgatacgattctatctgattaggatcgacaataaatctcaattactagcgagactagttctaatgtaatattcttcttttggcgttgccgtttggtgtgtagagcaggaggaggagatgggacaagagttaagatatgggctggatttgatgagagggaaaaaagtggacgggcatatgatgcgttcatatcagcggaatctgtagctcgcagtagcagtagtagattactgctacctctgtttcaaaatatttagcaccgttgactttttagcacatgtttaaccgtttgtcttattcaaaaacttttataaaatatgtaaaattatatatctacataaaaatatatttaacaacgaatcaaatgatagaaaaaaattaataattacttaaatttttttaataagacgaacggttaaacatgtgctaaaaagtcaacggtatcaaacattttgaaacggagggagtagaagttaagggtcggtttagaaaccttatgttggctgtaatttctcataaaatctccttatgtaagaagctctccaaataatttagacttttattaagattttaaaaaattatagttatagaattaagaggttttcgagcttcttcaaatttttaacagctactccagttctcagaatctattcgcgaacaggacgtagggctcgtcaaagtcgcggaaagcgccatcaccacgcaccattgcggatctgccgtgctgctgcctgcccaactctcattatttggctggctcactctcgctctcgccctctccgtccactctggattcgtagagcgatggaatccgccagcctgcgaatggagacagagcatgctagctactcgtttcctcctttttcagtcaaactggttctagaagtgcattagagcaggtcattagtttctcggcaagttgggggcgtgaatgcgacatggtaattacttgctccgatagtccgatcctactcctacctgctgatgtcgtagtagtatctgtgtggtggtaatttaacttaaacgtactgagtgactgatgaactgacctacagggcagggtgaaagtttggaactttagctgttgtcctacatttttaagcccagtggcatctgatgattgacgcctccgttctggaacttagctagtagtaaagtctgattaggtttaactaccatgcacgcgtgccacacatactactcctgatagcctgatcgtccctttcctgcctggctctggcgtgacatttggcctatacccattgtacacggccggtaaaactctcctagagtggcagccgttttcctggtcggaaagacccgcgtgtacaaaaaagcgagtctttacgatggaaattacgcgccttctccgtgcccgtgaggccaggccacacacacgagatacacaagcagcaggagcacgactgcacgagtgtttgctactgatgcctgaactgaagtagcccataaatcaagcctggatacataggccaggccagactattccgaacactttaggctcgcggacccggctgtttctcccactcgagtccaccagcagcttgccccgatgccctgtgctgcgtggccggccgcgcgcgggccgcgggggccggtgggctgagctgcatagtggggtacgtttgcacgtcgccggattctctcgagcaggccgcgagacgagcggcctgacggtgggagaagccagcgattcgcgtacaatcgcttgggccgaacagccgggagtatggggcgttctcgacctgcggtggcctcgccagcccaagatgaagaatccgggtaggcctcagtgtagctggacccgattgacaggctgcgtggaatcgcatcgtaagccatcttggttcttgcatgatcaagcgtattccgtccggcctgccaagcataaattccataggtctctctttctccactcctgaatccacgatacggtgggctgcaacttaaagccatgatgtcatacgatcagtacacaaaacagggatgatacgatagaagaaaaaactaactacgaagtactctagagcatataaataatactgtagtcaacacgggacttgcacgaagtgattccggaagaactaacgaagatacagctcgccaataactccgtacagtgatcagaccctccacgcatagcaagttgcgcctgcgacattcgcggtgaggttgtagcctgtgtttagttcacaccaaaattaaaagtttggttgaaattaaaatgatatgatggaaaagttgaaagttcatatttataggaaagttttgatgtgatagaaaagttaaaagtttaaagaattattttgaaactaaatacggccgtagtcaagaattatagcccgcgtctggtcttctttccaatggaaagctgcacctgcaagaacctgacaggagaagccgacccccaatataggagtactagtaaatggcaggggcaatcgatcaggttcggacaagccactggctgcctagccggccgacccggcccgcttttgacgagcccgcgcatgtgagtttcccggcacgagtgacggcacgaggcctgcaggctcgctgccaactgtagtgtactgtacatgtgcaatacgggggcacttagaaatgtttgacaccgttgattttttaacccatgtttaaccgttcgtcttattaaaaatttttgtgaaatatataaaattatatgcttacataaaaatatatttaacaataaatcaaatgataggaaaagaattaataattacttaaattttttaaataaaacgaatggtcaaacatatgctaaaaagttaacggtgttaaacattccaaaacggatggagtatattctacatgctcctatactatatgcccatgaaatgacgaaatggaatctcgcacatcctgcgtgctgtttctagattccagcggctcgagctctgatcctctcgtccaagcagaatccggtcaaagtctagattctctcatccccgactacgtgcgtgccccacgcaaagcagcatatatctattgcttagcttagctaacccctgcatgcaaagaccaagccagtaggaaatccacccagccgtatgtgccatgcatgtgaggccgcatgctggggttgtgagagagagattattggttggcgattcactcgagcaagcaaggtaagctaagctagctagcgaccaatctcctgccgttctttgctataaaatgactcgaggaaaagaagggaaccttttgggccacgtgaaatcgaaagctgttgcacatcccatcgttgccgtgcgcgatgcctgttgctttatggtgtcccccggtccatttgttcttttataactcgacagggttactgggataggagtagctagcatgcaagtatgcaaactcttacaagtacgcaattatagagaccactagatcatgcactattatgggtttactgattggtgcctggctgccaatggctctccccttcctctcgatctccacggccgaaagctgattgcagcatctttcttcgaagataagtatatactgtactgcattagcagcatacggattacgttacttttccacaatactatgcctctttccagtactacagctattcaacctgcaggcagctgagggattctctctgcattgttaatataaactttctattctctattgcaccgatttacatgctatattactgttaagtttgtctagaaatggcaaagtggctattatatatgtatgttgatagttaaaatatatatacatgtggcgcggcagtcctagtcaagtttctctctaaaagcaaatgcgtgtgtggatatatattgccactactgttggaatactcgtattattggttatggatgcgtacttcctcctccaatttccatcacgccgcacgtagaaattctccatgatcggaactgcacagtgcatagcatgtaagggctagtgactgtttcagattaaaagaacggaatagtacggtagtatgcacatcaccatcatttgagcgaggcaccaattaatgtttcagtcaaaataatagtagaagaggtaggataacatggtcaaaaggcatgtaactatcaattttgactgtcatgagttgctccaaaattcatgcaagcaagaaactttatcacaagtcccccattcttcgtgcacgcatatattacttgcttcgtttcaaaataaaccaatctagaatatcacacgggttacatacgaatatattgtactagataatatcacatccaattctaaattaatttattctgggatgaaggaagaacatatttagtccatacctatgaccgctactatcaacccccaaccccaaccccctcccccacacgcacacgcactccttggtccctcatttgatcttccaacactccaccacgacatcaccttcgtaattaaacatgttgtactgtggtacatatatgcccccgccatcaattgaatgcaccctttatacttatccataaagttgtttttagcactgccagtctggcactataggatggataataacctgataataatactagaaaatcagtgcgcctattggcatgcttgctagttagcccataatgtgtgtgtaaaaattgaacttcagtaaagcgtcattggtttttgtcattcgtttttgctgcatttgcaatagatatattatcattctaaaacttttttaacatggtagaaccgtatttctatcactcaataatacataataaaatagacattgatttttttagtattgttatttttgtggctcttgatttcataaataaatcttatattaaaacagttcatgtattgcataatgcactctcagtaactacgtgtagcgcccgttccgtcgtggcgtctagcgggaaaattatctcttaaaaaccctaattgcgaaatttgcttccttgcttgttgtctagcgtccgtgccatctcaagatctcaaatccccgatctatcgtcgagttcaattccgaatccaaatccctccaaatcaaattcctccgcaaaagtctattttacctcccccgggttcgatgggccgaatttctctcggcccatctccccctccctcccggcgctctctctctctctctctctctccctccctccgctccgcccgcgcgccgcccgcgcgtgcgcgagagccgcgccgtctgcgccgtccgcgtcgcccggccccgctgccctgccgcgcagccgctcggccccgcagccagcgcgcgtgcccgagccgcgccgctcaatccgccgcgccgcccgttgtttcccgcgcgcgcgtgccgtggtggccgaccgcctggtcgccgccgtcgtcagcgcctgtcgctcgtgtcgtcgcgccgctccaaaccgtcccgccgtcatcgccgtcgtcatcgcctcggccccgcctctccgcgcgcaagccgccaagggacggaggcagagccctcctctctctgccgcgacgcccccgctcccctcctccatttccccaaagaggcaaggggcgagctcccttttctctccctctttttctcctttttcctcccgccggcgtcatcctcctccctccgccctgtcgccgatttggacgcgagcgccgagcgccagctcgcgccttgaccgccctaagccggttcccaaaccgacattgccatcctataaaccccagcctcccctttcccttcctctcccattcgcctccgcgccattgccgccgcccccgtgctctgttcgttgtcgccgttcgtcgttgcgcgtgtcggaggagccggcatgagcaaggacgcggaaggggactccgggcgcgccctctccttcctcttccccggcccgaggccggggagattactcccgcgccgtcggcctctcgtcactgcgccccgccgcacggtagtgcctccctccatttttcctcctcgctccatctctcccccttagttttctagtggacgatggtttaatggctttatgcacgcatatattgctgtagctgggggtcaccaccatccctccttatccgcccgaaacacttagaaggaagagtgagtttctattctaagtgtacgggtggaaaagtgccattcgaacagaaaaatggtaaaatgctatgcgagttggaaacactattcaagcaatttcttattactaagccagatctgttttgagtattgtctaagccaatgacaggtaaactatcagtcactaggtgaacaggaaaaggtggtcgaatggtcgagatggaaaagactacttgccaaggagaagactctctaccatgaaaaaggctcgttctcatggagaagacagttcgagcaataaagatgccacgagaagatttccggggaccactcaaccactccatccagctggcaccaaaagactataaaaaccttcgagatgtactaaattgcccttggaattgctaacatgttaagggcacaattgtaactttacataggcccaatgagggcataagtgtaatctcatatgtacaagttacaaactatataaagcagccaaaacctgtagcgagacaggacatattggaatataaaaaatcctattgatcaaagggcgtgcattttgatgttcgggtttatttcttaggataggcgggaaaagagtgtttttccgtctatccccaatcttatccgtgacgttgggtcacgacatatatatataacactacgttaccgctatgacgagagcgaggagaggacctatcaatggctgtagcttacgacgaccatgcatgtgtgcaccccacattgttgtccagcgcaacaaaatttttcaaatgtaaaaatatattttttgcaaggaaatgtaaagagattttgtaccacttccctcgacttgtcctgtttcaataatcaaacaattctatttggtcagatgatcagcagctgggtaatgatttttttaatactttctctatttgaaaatataaataagattagttgattcaagggagtttcagtagagagtgcactaggtcacagtgaactttgctagtttttttttctacttccttcattttagatcacttgttattctaacaaatctcaaatataaataaggaaatgtgacaatttatatattaccttcttaggtactagctattaactatgatcaacaattgtgtgtgactgagttgatgaaggataggaaaatcacctctaaaaactctttggaatttagagtaaaaaaagttttggaattaatgtgagaatgacaagtatttaacaaaatgaatgctacaatgataaaataacttataatagatggagtaatctcatagtgtaggtaattatgaactgtataaaatattggtctgtcttaaccttggacacatcaagtccaatttgctgctcttccctactttatttgatctgaaacattatagatttgttatggctgttaaggaaacgaggcggcaatttgaggtgatttattagtgacaaaaggcactttgcaaaaacaaacaaagaaaaaggcaaaaggaagagaggaagaaaaggatgcatacttaggagggacgcggaaagcggtctcgatctttttatgcgacgatgttttgccatctcttagcttttcttttattcccctttcttcttcccatttagcgcgcactaacaatcccgatagcgacggcccagaaaatctaagctttaaagtgccaagtgcgcagataaattttctttccatctcaactgcgcataatccctgatcaagtgatcatttaatgatatctctaaccattttgggcaaaatcgacctacctatccccatctttccgacccatgaacacgttactcaattcactacgatgtgttgtttgcaggtagctagctaagcacacacggagatatgatatagtagtgtagaagtagtttgttttaagttggtttctatcttctggttgttattgttgccagcactaccggcatagttggtaatgtttttttgtttcttcttttaaccaagcgtatcagagaaaataatttacagcagaaagcttgaggagatgctgtccaatgaaaagttagtatgccccaacttgtgttttttaaaattgttgtttcagttgaccatctttcttgttagtgtactgctgcagcacttggctggaacagcagtaatcagtacgtgcatcttgaaatcggagatatttgacagttgctaattaacgtgggagaaactgaaactgtaccttgaatatcagacgacactgaagaatattagtatgaggggaagctgaggcacgcaaataagatcaacagccaaaactttttcaggtgtactgtccagaaattgcaaccaaatgaggccctttaatttctctcgaacggacttgaaaccaaatgtccaacaaccagaaaaaggtctgggactactctgtgtttcgtcctattggtagaatagcagaacagcaatgcaagagtagttctgctcatgatagccatcaattatcggaacagaattaactactccaaactacagtgccctgtacaaaattctatgcatgatacactctccattctttttggaaagatgtccaggttcagtgaatttagtgtccttggtagtgcccaagcactgttccattctgcagtactgacattgtgtagcataaggtggtattagagtaaggttgtctcagctcacagctggaattttacgattaacctaaaaggttacagttttacaatcataaacctttcaaggttcacgcttaacgtttggtcgatgtgcagttcgatctttacttagcgtggttggtttgataccttattttaagcccttgtggggtcttttggccttttggccttttggccggcgctctgatagtcacatcacatgtttttagttaacgaagtagatgactcatcaattattcattagctccatcttggtaatatcttaaaaggaaaggttaatgtagtggtaaaatttagataaaatttgcaaaatgccatcgtggagatttttatgatggttctaagcatattgtccataaggaaaaatatgaaggcagtttcagtcctccaggggtcaagattaaggttttaatttttaggaatattgaggttataagatgttgcgtttcgtatttcttcaggtttgaattttacacaaattattgatacggagtttacttaattaacatgataaattaatattttcagaagcaaacgtcataaatagcttagaaccattgtgatctaaacaatatagtggaagccttttacaagtgtagagcaaataatctgtgataataacaaatctgaaaagaaaattctaaaaataacatggccaaatagattttgaaataaattatttccctgcggaaaccctttactcctagttagttcttttcgaaagacgagcaaaatgcccatactatactatggataaagaaaatatataataatatatcacagacatatttacttatttgaatatatgatattcactcgattaaaaaatagactattgtataatatcagaaaatataatcatcaccaccactggtgtcttttataatagtatagataccaactaatcatgcatcaattctcatcataattttaattgtctaagtataattgaaatagcattgcaacaaatccgtgcatgtcctaaaacttacttgaccatctagatttcaggtgattaaaagtttaagaaattttagtcgcttttgattgtttctttttccttatatataacaagttgaacaacatatttaaacatataaaaggtacaaaattatatgaaataaatttacaattaaaaaactcatacctgaataaaaataaagtaaagcaatgctactatatataacaacaaaattacaattaaagagaaataaaactacacatggcatactactgcaattttgtacaatctagtttttgtctattttttataattaaatatacatattaaggtttaaccttgtttttttttaaaaaaaatgagacgcctttctttatgtaaagtacgttggcaacaaaccaacttggttaaaaaaaactttgcttcacatcctcatttgcggtttgctttgtaatcataattttgtcagtccttttacataccgaccttgacaaatgtgtaggtatttgaacacacatcttgggaaaaaggattgcaattgtaggatagaagcacgggcaaaccattacgcaactgaatgcccgatgaaaattatgaatgtgctagaagccacttaaattttactcagttagcgcttttaggcttggatttcccgtttaaattttacacctcttggttagttggcttcaccactcatgcgtgcgtacttcttcacaaatggggctacagtcggtgccaatgatacaacatgctcacagatccttcagtttgtgtaggcgtacacttcacagatttggcaccggggctccacattgcctcttttggcccaacgacaaggcctcccccctctcccccacctccatcttcgccattggctagcgaatagcagtgcaaccctagctcgcgcctcgcggctcgcgcgggtggactcatgaactcggcctacgctttacactgggctagaaaacaaacgatacggcaggggatgcccccgccgcggcctaccagctaagcaggcgagccccctcacacacgtagaatccacatatggtgacatgggatccacgtggcggccccccacgtgccctatcgctgggcccactcctcgcagctataagtaccccgtcctctcccactccgcctccacccacctctcaaactctcggagaagcgagcacacacactcactccctgtctcctcctcctcctcctcccttgaggctgttcgtctcgacgagtgcttggctttgtgtttgtggtgtgtgatcatgacgaaccaggacgtggtggtttctgagatgggcatcgcggcaggcgcggcgctgccgggaggaccggccggcccggcgggcggcctcttcgcgtgccgcagcgcggccgcgtcgatgaggcagacgtacctcgacctcgccgcggcggcggtggcggcgcgctccgcgagctgcaccagctgggccgacgccatgcgcgcctcctcccccacccgctcgtcccgctccgcctccgacgtcgacgagttcaccgcctgggtggtgagtgttgtagctagctagctagctctccccttagcttgcttgtcctctccttctcgcggcgtttctcgcgctcggtgcccagcccccggctattgcctttctggagtggtgtctcaacctttctctgtgtttcttggtggttcgaacagaggaagcacccgtcggcgcttagcaagttcgaggagatcgccgccaagtccagggggaagaagatcgtaatgttcatggactacgacggcacgctctctcccatcgtcgccgaccccgacacggcctacatgagcgacgcggtgagccaccaatccatgcatcgtgccgcgatctgttccggccacctctcccatctcttctcttttgctgatgacgctctctttccatggcggtgcgcgcgcgtgcgcagatgagggcggcggtgcgcgaagtcgccaagaccttcccgacggcgatcgtcagcgggcggtgccgcgacaaggtacattgccggagccactcctctcgccgtcccagacaccgtgacactctcgcgcgtgtattctgattcctctttgcccttcaggttcgcaacttcgtcggcctctccgacctctactacgccggcagccatggcatggacatcaagggaccaagctccaacgtatgctcgctgcacctcttcatccaatcatctcctcattcccagctcactctcgctaattaatcttcttcttctcccatgacaatctgcagccggagtctgccctttgccagccagcaagcgagttcctccccatgatcgacgaggtactaacctgcctcgctaatgaggattaattagtagctggacacttgtcgatttgtgattaacccgcactgattactcgagacccatagatattaatggtgatgaaatattcacattttgtcaggtgtacaagacgctggtggaaaagacgaaatctacacctggagccaaggtggagaacaacaagttctgcctgtccgtccacttcagatgtgtagatgaaaaggtaggcaggactcactctatcttgggataccaacacaacagcttcacttaattacactgctttataataacgggcagctgcatcatgtgcggccataatttatccacacccatcgtctcaagtctgaaccattactgctctcttgcagagatggaatgctttgggggagcaggtcaaggccgtgatcaaggaatacccaaagttgaagcttacccaaggaaggaaggtaggcatgcataatcttgttaatctctaatgaacttaccaagtaattacccagaaaatcaaatcagttagagatacctagtgaggatctattttaacgaagattgcaactttgtttttgtcttttttttaggttttggagatcaggccgagcattgagtgggacaagggcaaggctctggagttcttgcttgaatcgctgggtatgtacgaacatctggacattttgtcttttctccaccttctatgagactatgactcttgctatctttttaattaacctgttcgtgtcagcgtcgtcacagtcgctttcgtttcggttttatttcacttgcgttccacaccactgtcgtaaaaaaaatcggctgatgacactttgcccctattcgctgttcctccccaggattcgccaactgcggcgacgtcatgccggtgtacatcggtgacgaccgcaccgacgaggacgccttcaaggtaaacatcacatcagtttaacaagaacacaacataaatgcatgcatctaatcatcactttaccgattaattcatgcttgcctcggtgattccgactggtgtttgttttacacacatgcaattaacttggtcaaaaccttttgcctcgctatgttgaaaccaggtgttgagaaagagaggtcagggcctgggaatcctagtctccaagtgccccaaggacaccaacgcctcctactctctccaggacccaacagaggtaaacccagctcagacaagaacatgtccaaatattttacctttttgtacgtatacacacgagcacagcacgtacagaatatataaaacgtttttgacccgtttctgcaggtgatggagttcttgctcaggctggtggagtggaagcggaagtcgtcgtcgtcgtcgttgatgattcgtccgagagtgtagcggcgacacggtgtagaggccgtaagaaactgaaactaagatggtcaatcatgcgaacatgcgaacataccccaccaacaccacgtactacccccatttttttccgatgatttctgtggttggcctctgcgacggactcgtggtggttacacgctagctgttcgattccgtcccctgtgccgccgaggaaaaggagaccaccaaaaaagaagaaaaaaaaactctcgcttaattagctctcgatcagattccggcatgtttgggcgcgcagcggccggcgccaaagcaagcatggctccaggcatgttggtcactggtggtgttgcagctgcagtctagaacagtaaccatgtctactacccggcaatgtgctactactattactagtagtctactgctgctactgctactacgactacgactactacccttgttattattatttttttggtcccatggacttggaaggcatatgcaaagaaacctgccatcctagacccttaacaaaaagagaaggttctatctccatcgatctgttcatcaccccatgtaaaatgtactactactagctagctagagcaagacttaattcatccgtttgtcgacagttcgtcctcgatctccctctgtaaaatgtaatggagttaattaattaatagcaatggattatttcgcatgtcgtagtacctctccatcgatctgggatgctaactttctttgctctttcgatgatctcatgacgacgaagatatactgtgatgtgagcatgcatgagcaccgggaaacaaaaggaggccaggtggctagctaacaccgtacacatacaacacctcgcgggaagcatgtgaacggcttgctgcaggatctccctgcatgatcacctgcagggttcttgcgtgcagtgacaaactagctagctagctccaacaagatcgcagggcattgtttacaggattaaccaggtcgctctgattcctgtcgagcagccgtgattaacgggtacatctcgcgtgtacgaacgtgtgatatatattaaacgggggagggttctgaattgcttttcagcctgtgctgtactatggaaacagcttattaagacggagacgtgtgtatcagagatctacacatgtacacctatattactaacccaatagctcgatcatgttgatgattccttgatcagagacacacgataggctggctcttccaaccatgcatgctgtggtcctgcctcgctgctcgtcaatgtgtgcaatatgcaatgtattctatatgtgctgcatctttgaatattggtgtaagttcttgatatgatcagatttgccggtaaaaagtagagcggaattaagcacaacctaattaacaatctctgtgccttgtggccttaattaggccgcaactccctcttaagacgactcattaatataagtatagccaattgttaatcatcggtagatgtatagtaccactactatatatacatgcattaagtgagtgaagcctctcccccctgtccagatgattcctcacaatgattcgatgcatattctcatgtgattgcatggccatagtacagttctagagcactagctcatgttcttctgctggaaaagccagtgctacttaaaatgttcatctttatcagaaatcattcatatgtggaagcaagcctctgccaagattgagctagctagctgactgtttgggaccaccaaagttgcaattatctttgatgtgtcacttccagtgaccaattgatcatcctaccacttttttcccagacgcaaagcaggtttcctaagacatgaaaatgagtaactgctgctggaaatgaaagcattgccgatccaatcacgcacacaataatgcgcccttgtgtgtgctggatttagtaggtccttgcccctgtttgtcctgcatgcccagtatataccaatgtgcactgtactgcagacaccatagcacaggaactcgcaagctagctaggccattggtggttacatattctgatgcaatttatgattgggattcagtggtacatctgatactagaaaacatccgccaaccgaaacaactttaatttgaatactgctaacctagcttatcaatcgccatcaagctgcgagccccgcatttcactgctccaaccaaccagaagcacccatgcacacacatcctcctcacagctgcagcgatccatcgtcctctgatctgcagtcgtctctcagatggccacgcaaggtagggttttgttggaccccttggtcctatgaaaggtggcatgtatgcgatgcgttttacgggctcagagtggcctcatcattcgtactttatgcctttttggcaccagcaaccaaacccctcttcttggggctcaactcatcatccaagtgttatttgctgcaatcaagagccgataaaatgcatgcgtatctctgcagcaaacgacggcgcgtgagttgatgaagctgttgcgttgcaacatccgtcgatgtggatatatatatacccaggtggtgattttgtgccataccatagggtctttatcattgttactgctgcagtgtcaccatcttaactgctcctatatattatctctctctcggctggtagcgatcgaaactttcagtacgtgttatatgtcttctgtcccttgctgtagaagcaaaagattgcagttttgctagctggcagtctatactaggagtcctaaaaatgtagtaattaacagaagaaaattaacaagcagctggtctcggaatcctttcttgcgtggatagatatatgatatgatccaaacaggcatactacactcgatcactagctaattatccctgcattgtttcctataagttttagctacactaacccaagccaacatggaattattaattaaagccggcgcggctttgagcgcgcgcgcgcgcgcacaagcgtacagtcactgatcgtggtactgattatagaattggcccctaatctggcattgagatccccaaattaaccaagccagcgattaaagaagaggttaaaaaggatcagggcaataaaataggcgatgcaaccattatagggtgcagcgaaataatgcttgtttatacagatccaagctgctttgcgtggatattttacgccaaaggcctcgtagaaagctggctgcccttgaatcaagtgacaatggcgagccagacccccacaagccccacatggctcccaggtggagagatctatccggtatccactattcacctaaacaatctagaactcttcacaagatgcatatataatttttacatgcctcaatgtggcacactcctgttacatgtactagtgctactattattgagtttgttactggtagaagattatattagcatggagtgcttcacatttccagaggtttatcactagttctgttagcgaataaaaaggtcagaaggatcagacacacagcaggtgaagtgagtgagagagaaaggggcattttttgtttgagagatactgctgctgctaatgctttttttaggtagatcaaaaggaaaggggtgactggtgatcgaggcacaaattatgtgtaaaggaatctgatggttgagaagggagttggaatccactaaagccatggtgctttttattctgcagcaccacctgcagtgcagtgcaggggtattgaggtattggtacacaggcaagtgtccagaaaaggctttgacatttgacaagtgcccccctttcctatgtggaaaggtgttgagtccactgtgttttagctcatgattggtgcctaagccaccgtataaaataactaaccctagatgaccctcattattggtgcctggtggtggttgggttgggtaagtaattgggttttgatcagttgagcttgggtctctgtctccgatcgagtcacatcctgagagaggagccactcctgctagtgccgccttcaacacgagcccatgcaaagtgcgaccaaacaatgcagggcagccagccagcacaactcccgagaatctaatgcctgcccaatcatggacctaatctagctagccaggtgttaggagaggaacaactgtcaaaatgcccttcatgcctgcatctgcatgccaattccagatcttttatctgcccatacccatgcgcatgggccttctgcatgcatatgccctctgagtttactactactactagcttgctccaaaagcattgccccaggactaaagatggtcgatcgatcgatcacacaaactcatccctactgtatcttattcctgcctgatccgtaggcagcctgtagcagctagcgtcgcatagatcaaatcttccatgtacaaattatatatgtactctatctagctagctatactaccctgcaggacggtggaaagtggaattatagttaccaattcgtgcagctagcgattgggatttgacgtgttgacgagaactgttcggctttggcgtgccggccagctttagcgaccagtagacccggggggcctcgtcccgccggcgtcagatgtgtcgcgcgctcgtcgctcgatctcctcctgtggctgcgggctcgcccacggggcgccctaggcgggggctttttccgcggaaaagaggcgcgtatgcttccatccgtgatccgtccatcaggtcacactaggctatccccatcgcgaccgcgaccccggccgcgcggcatgggggccatatacgcgtgtcgccgcctcggccgtgccggctgcgggtggacacgcgcgcgcggagacgacggacgacgagctaggcattacggcttgcgcgcgagggccgcggtcttgcagggaggggcgcgcgccgcacgaggccgcggtttcggtgtaggagttggcggtgtttgttttgtttactgacccggggcggtcactacaggtggcggcggcatgcgcgcgcgcgtgcacgcacggccgatcaatctgcctcgcaggcacgcatcgtaccgggccagcgcgcgtgagatcgatgggcgtgtgtgaccgtacccgtgcgggggtttgtttatgcgtgggcggataagtttagcgtagcatctcaggggggatcgatcgatcaacgtgcatgcgcgtgcgtgtacgtgttggttttcaatacgtggagtgctatgtgcttccaaaagtttagccatctgtatattaacttatacagtaccgtacttgattctaagggtgacttaaagaggcatgtactacatactccctcctttcttaaatgttggacgtcgttgacttttttaaacatatttgaccattcgtcttattaaaaaaatttaaaaaaatgtgtaaaactatatgtatacataaaagtatatttaacaataaatcaaatgatagaaaaagaattaataattacttaaatttttcaaataagatgaacggtcaaacatttttaaaaaagtcaacggtgtcaaacattttgggatggagggagtatgtaatagtaatatgcgttttactacctcaaaatgcatgcaaggatatgcttggatgggtaatgttatctattataagatccaagcgcgcgaatgagtcgtgtactacgctatatgtttacacccgagtcctaattaaactagctatcgtatcgtgccatccctagttgttggcgtcctatttgtcaggaaatatgaatcggatctcgtgtacagtcgtgtccaccttttcccattaatgaagatcatgtggtggtggttcaagtagtattgtttttgcacgcacgtagttacacgtagcgattgtctgaccatgccgaatgtatggtaacattgtaacatgttcgttaattatcatattaaggcctggccttcattggttgactagccagcaataggaacaaatggatgtactaaagtgctataatgtaacgcagttgtactagtcctcaagcatacaactgcagatcaaggaaatgacaacactagtaattaactagcttaacactgacgtttcttttatttcttaaaacttgtgataagacatgaagagcatgaagtacttgatgtcaaactcaaatttattctctctatataattaattattaaactgccaaaatgtccaatcgagtagcaaccaattaggatttcatcgatctggagtatccagctgactgcacacgctgcgaaataaatatgcataagtctcatcttcttatgtttcttttttcataaaaaaaatgctacttctagttaagttctgattggcactcacgaccagctagctcaaactaaactaatgaagcttaatttgattgattaaacaaagatcgatcgaacattgcctccttccggagttgttaaaccgtcgcttcagttgagagtcccactttcagtctttcagagtgacggttgttgcatcttcacttcacatacattattccttcgcatgtccttttaatttctggtcctggagcatcgacgatgaatgtgacagaagaaaacagaatatatatcataagatactgtacttatatgtatagtactatactgcacacataaagaaactgagaagtgaaaaaatgcagtgtaatgggccaatgactgcgatatgatcgataatgacgccactaaagaataagatcgccgagaacatcatcgtgttgctgactgtacttgacatcaactcttgtccttctcggcgcctcggcggcgagtcaactgtccgacctggcgccgcctgtgaaatatctccgtcgtccaaccatcagtgacccggtcgtgaaagttttttgcaggcccactgcccaaccgaatcactatagagaaaagtgtgtagtactactaataattaccagttgttttatcaaaaaaaaaaaccagttgctggtatgtggaattttattagtacggcttaactagtgtaatagtcaccgtcaagattgtcaggttggcgtgcagccacacgcacatgcatcaattgtggcacgtgtgggttttacaggcaagcagtaaggtgaagaacgtggttggacatggaatgacttaatcatttttttaggagcgttttttctttaaaaaaaggttagagcatattaatattgtagctgttggataaggcatgtttggttgagtattatggatgtacagtcttttagagaaaaatgactgttttggtttgatgccaaaacttaccctaccaaataattggcaatttaaatagtactttgtagatgtttggattgattccaatatttgcaatagctaatacaactcatatagtccaactctaccaaaatattggtagtgccaaaatatacctaagatttggtactgtcaatggtttggtagtggtagggcatcaaactaaatgagtccaaaaaatattttgggatggattagcagcccagccaattgcaaagaatttggcccatatgtgatattcagctttgggtctaaattgtagtagcagtatttggcccatatgtggttttgcagctttgggagtttgggcccaaattgttgctcaggtccactaggccactagcaaaacccaacgaacgaacggcatgcggctcgagacgaacacggagatgagtttgtcgcttctgcaaggctactcctccgccgaggaagacgacccagccgccgccggcgccggcgctggcgagctgagcgactccggcgactcctccgctgaggacgccggatcagacggcgaggaggcttccgctgctccgaggccagccgcgaagccccgcccccgcccaaaccctagccgcggggatgctggcggcggcggcggggacggctcattgctgccctcagcactggatgccttcgcggagatatcgggcccgccggagttcctgaacaatagagtcgccgagcccgaggaggccgtggaggcgctcggagtgctcgaccgccgcggcaagggcgggaggggaagtgacagcaagcagccgcctcctggtgagccttctcagctaattgaagcgagtattgatgttctctcagaagtttattaatgagtagtgttttttagactcgatttgacatctgcagtactagaatgagccctctatttcgtcccttttggcaaagcaattatcaacgtaggttcaaatctgacattctcggaaatcagaatagtagattacactttgtggattgaatgatactatcacctatacttggtgtggtgatcttcctttgatgtatagatattttgattacagtgtgtctgtgttggataaaagttctactagagtcaatcgcttcaattctagaaagaattgcaatgtgctggttgagattttggtccaaaaatgggtaatatgcagtggtgttggagggccttggcccttgggttgttcatactgctcagtgctttgattgatgtgtgcctagtctttcgtgttagatgtctatacagatactagggaatgcgctcgcatggaatcaagatcttggcacaattgggatgcctgccaagttccaattgagggggtgcagcgcaaaagaagggaacattttttagccaggctttctttgacatggtagctccaattggcacccctgatacatgtaggacagttagaaattggatcttacattcgcatagcaaaataaggggataaattcattcatgttatgcgttcaatggttgattttttttccaaaagtaccgtacttcacgttttgcatgaaagtactgtcaaagtgcagcatgtccaaaaaaaaagttcccatcactgatgactgtttatagaatgggctctgttcttacaactgctttgaatcggattggcagtttatattttgcaaattattgatatgcttgggcacaaggtacatggtaaatcggatctgatcactgtatgcgcttctatgtgcttagtattagcgtgtcaagtttctgcgatagcacttatactgtttccagttcatgttacatctaagagtgatctgactgaaagccttctccaggtgccgttgtggtcgcaaaacctcaattggttgcaattcgtgaacgagttagcagtggaacaaatggtgccaaccctccagtttctactgaaggaaagagaataataggtgcggcaaatcctggtccagaagatgctgctgatcttctaaggttggtcatttttatcaatactacaacaagataacttgaaaacttagctgaattcgttatattcctggttaattatttactgctcttaaaactgtgtttcttttcaatctgtagaatgtgcctccaatgtggtataccaaagacctattcacacgcacgaggtatggtgtgtcctgtttgcaacgatagaccagagcaggcaagagagccagaaaagaagaaaggatcgaccgtcaaagacaaggagaagatcaaaaggatgagggggcaatcatcacacgcttcgtggaagagtgaaactgagatggccctgcggcaacaatttgactgattactaactagtgccacctcctatacttggtgtcatgtgttatgtacactgcgaatacttatgtaatcctatcttcatcaaaatcccgtagaactgcctccaagagtcatagtcggttcccgattgtgtttgctgtattttcagttttccaccatgaatatggatttgctcgataagctgagaaatggttccttgcaaaattccgtcgaagccaaagtttgagccaattgtatgatcatttactccctctatcccaatatgtagcaagttttaagcttgtgcacaagtattaagtaaagtagaaaaaagaccatactaccctcaatgattattcctgtactaaaactcagtggtggcggtttgtttgctgccatcaaactcacacgtgcatttcaaacgcattggcgccagaaagctggtaaaacacagtaaaaatccactcacacgcaaatcaaattttaaactggtagacggcaaaagcacatacggcaatataaactagtactccattattttcttctctttcactgataactatgctgaggggtagaattggtagatttattttcttctctttcactgataactatgctgaggggtagaattggtagatttgtggtaagagttgtactaggttgtaacatttgggacaaattttgaatgccaaaacttattatatattgggacagagggtgtatttttcctcttgcaaattgttcctcagacaagactggaagtggcaatcctaatgttgggtcaggactcatgagtgcctgatgctgtaggactgatgcggcatcagaattcttcgacgcaaggaatgaaatgggttggttgggacttgggacttgtatttcgtctccaaggctcgtccatcgtactgtacggacagttttaaattttactatctataagcagggatagtcatgtggtgtaacatggccaacgtgcaatcggtccaaggagatagacgcgaccgtaccaagcagtaagcagatccctccgtctaccattattattcgtcctctactttctcggatccctccgtttcgtgcctggttgccagtaacgttatccggctcatccaacctgtttttcactgccatcctggagcctctactggttcattttgcagttttgctgtgaaaccaaaaacagcgttaatagtgaaacttctgggagaaagacaaacagttgccgccagatgtatgaagcaggtggagtagccatggcatatggcccatggggcctatccagcatgattttctcgttagaataatgcgcgttcatgtccgatcgagacgaatgcggccgaagaaattttccgcaccatcaacactgtgacagcgaggcccccaccgccacgagcccacgactcatcaactgcttccatttttatactgatccacatccactccccccgatctccgcagctcacacaccgaaacaacacacatcgccactagctccctcgatccgattcggatcggatccatggctaacctcgccgcctccctcctcttcctcctcgccgtcgcgtcgtccgccaccgtgccagcgcatgggcgccgcgacctcctcccgactcgcatcaaggtacgtcggccttggatctctggcacctcgtcatcgatcgtttaatttctccttgcggcttcgcagctggtgaggggagccgacgccggcgccggcgccgtggccggcggggacaagatggagtgcgtgtacacggtgtacatccggacggggtcgatctggaaggccgggacggacgcgaacatcacgctggagcttgccggcgcggacggcaacggggtggggatcacggacctgccgtcgtggggcggcctgatgggggagggccactcctacttcgagcgcggcaacctcgacatcttcagcggccgcggcccgtgcatggccgcgccgccgtgctggatgcgggtggcgtccgacggcaccggcccgcaccacggatggtactgcaactacgtcgaggtcaccgtcacgggcgcgcacaaggggtgcgcgcagcagctgttcaccgtcgagcagtggctggccaccgacgccgcgccctacaagctcgaggccatccgcgacaaatgctccgccgcaggagcgggcgccgccgcggcgtgagcgagtgacgcggccacgccgtgggaaataagctcgtacgttatctgtggtgagtggcatctgtagactgtgggggggtgttcatgttttgatttgtaaagatggtaatccgcgtgcgttatcatgtacggtggatgctacagactatccgactaataactttgcgagtcgccggtgatgaaccggcgttgtgtttcctcggttacgcatcgtcgtgccgcctcgtcatacagaacaaaatggaggaaaaatcgcctaagacagcaacgtaaagtgaaataaatccagctcaatgacaacaatggaaaactaaataattaatcggtattgctaaaaatatgtcgccacaaattatgatggatttcagtcggttgtttcaaccatcagatgcggatgcagaaatcaccgcatgtgtacgcatatccctccgattctgttttaacgttatttgctaatcaggattactaattaatcttaaaaactaaatatctgtgtcattgcaaatttatagttttgtgacttacatcaacttacatatgtaattttaggacttacatatgtaattttaggacttacatatgtaattttggaatttacattgtaaatacactaaaattacatacgcaatttagggacttacaatgtaaatacatgccgaccatttttttgatgaaaaatatggtgccataaatatagctactccctaattaattaatgcgccataatactatgagatagctttcggattttgcgcctaaagtcataagaaatctgggatatcattagcgatggatcgacgacttgctgggtatcatcagcaggctggcccatcagctcatggcatgggccagtaatgagcctcccctgaggccctgtggcaggcaagcgcgcgcccaattagcctcgtttgtgaggtccaatttttcggcccatcgttgcgtttgggccagaattttagttcaacgctcgagtgggccccagcctatcaacaagacacagagaagtattaaacttccagatgctcagataactagtaccctcgaataaaaaaaaaggataactactaccctgggagagtttgtttttgagaattcatttttagttcaaaatcctaggtctaaattctattggttcatttgatccatatcattaccaatataccgaattagaaaaataccattaccataccatcgccatcagattttccttccatcttcattctttcctcttcttctcccatggcgatggttcaagagtgaggcatcaagacgatgaagacaggaccatgggtgaccggtcaacgacggggtcccaaatttgctcctggagcaataaagggaactgaggaggaaggaggccaagctacgcatcggtactagagtgttagccctgccgctctaccaccctgaccgcccttgcaacctctccacgctgaccgtgcgtcgccactagaggctatggtattgagcccatctgctggagccaaactcttatcatctcgcccactagagtttgccactctttgtcacgttgcggacctcctcaagccaccgacacaaagttcttctcgtcgagctcctcgcagccagcaccctcatcgagctcctgcactactaacggcctccttgaggcaccgcgctgaagtcttcttctgcctcttcatcactaccgccataaggtggtgccatctcgttctccctagcatgacgattctgctgctactagttaagcttcaacataggaatcggtgaagccgaggaggttgaagaagcgtaggccatacatggaggaaggagaggaatctaacatggataacaaaaaaactagacgataatggaattgttatcgatttgacaaaatttcagtggcacccaatagatatcgcgaatagtaatgatattttttttcgacaaatttgcaaatgatatttatggatcaaattaacccaaattttatcgtactcagatagaaactgacgggaatatgaattctgccgagagacggcctcccttagcgtgccgagcaaagcaacttcgcaataaatcgatggctttgccactgccgccggccggtggagcatgggcctagcgccctagccacccattgccgtcccccataccttgcatccctctcaagtgcatctcccctttcatgattgcaccaaatgttcttaaatttgagctaactcccttttacaatctttacacatcaccgggttcactcatgcacaccaacctctcccagcttatcattggcacacagataaacaatcacggcgacctcattagtattgatcgaaagtgctaatggtacaagagaaccatcattaggtgaattttattatctcaacagaaataattaactaacctagtaacctatatactaccggtgcccatcggattgaaaaataagtccactaatatatgcagtagcgtttagtttgctttgaagtttcatgggcagttcttgtgatgctgcaatgatcaatctctcttctaaataaattctgcgtcgccgcttgacaattattaggtttggcgccaccgcggcagccacacctcttctcgctcgtagagaccgtgacagtcacgaggcactggacctctcatcaagttatggagctgtacacaattcattgcaccacggcacgagttgtagtagtggaaatgcagatatgttcaccatactgcatatcctgtagcattgccattcgccgcagctgtagatgcgagctgacgaacgaactgtgcatgcacgcgcactgcacttaaaacacacaagtattcgatcggcagaaaataaagttcagagcaagaaggtccaggtgccatacctgtatcttgtagtggtacgacaaaagtagtactccctccgttttcatataaaaacgttattaactttcacaaggttatttttaaagtacctttaatgataaaataagttgtgacagagtaaatattatttgcacatttctttaacaagatgataatgatgaaaacatcatataaaaataaaaaaaatcattatatttaaaaacggaggtagtgtcaattcagaattcagattcggtcatgcttgttccagattatccatcaccacggcagatgcagattatgcacgggcgcgttatattttgttcccaaattaaatctagcgaagatcacttctcagttcagtctacagtattcctccgttgtattcctccattttttaatagatgacacaattaacttttaattaaatacacgattaaccgtttgttttatttttctcgcaaaggcataagatataaattatgcttaaagtatttttagcacaacaaaataaatgatagttacgtaaatttttgagttattttcataaaactacatgcattttaacacgttgtatcactaaactacaaattgaacgctaaagtcatcataaaactacaaatttaaagctaagtatatcaaaactacctatttaatatttaaataataaagaaattgcataatttagagtttaaattcctatcactactattatattggagttataaacgttatagttttgtggttaaattggtgctaaatttatatcaaagtatctatagttaaaattttcttaaatttttttaataagacaaattcaaacctgtatccgaaaattaacggcgtcatctattaaaaagcggatgtattgttgttgacgaaaaaaattgaacaccggcctgggagatctgcttagctcctatgcaggttcaaagattgatgagatgtgggcgtgccagtcagtttgatcctgcaactgacaagatatgcaaatagtagatctaaacagccgatcggctgacaagccgatggagtagttccagccgatagccgataatagccgataccgataccagccgatagcgatagggtttaagcaatcggctatatgtccaatgtggataatgatataaaggcaatcggctgatgataatataatatagcaatataatccagtagaaaccaatcggctaacaatatgaaatagtagaacaaatattgatccgaaggttaaagcacacatcggctggaggtccgatgtcataagatccacaagattagattaaacagtgaaacctttgttgccatcggctaaatccaacttatatgtatatacaatccctacaagccgatgcaacgtccagataacttatcggctagcaccccgataaaacattagcatgaacctatcggcttaacaagacttatattatcaacaacaatctagtagatcgaacctaaccgatgcagcacgagattgtatatgataatctaatactcgatgagccgatagatctatctaatgtgatggatataacaaatctatttagaacagcattatgattgtagagatatatcggctaagacaggagatcagacctaaccgagacagtcccaactaaaccgatgcgtctctaaacacaatgcaattagagatagaattgagatatcaggtaggcaaatatatcaaccaaaccagagcgatccaagagatcgaatcgatgcagccttgaacaacaccaacgtagccgatagattcaccaggacccgacagaacgtaggacttaccccttcgctggagatcgaaagccgatgcagccttgcgtcaggtgcccaagttccgccgaaagataagtaaaaacctcagggaagagggtggcgatgcgccgagagtattatcgatcgatagattgatagattacaatgaccccgggtgtacatatttatacccatagggagatactagtccttatcggacaagaaagaaactaaaaaggaaaagataaagtccttatcggacactaaacacactttcctaaagataaaaggaaactaacaaactatgcctaattaatagataactgtcatgtcgcatccttcttgaactcgaactcttctagataagcttcctttgattgatccgactccaccaagaacacgacatcgtggcgacttctcccatcggctgattctagaactttgaagccgatactgactctaaaccgatggtaattttgggattaccaaatttcactgttaacaattgtcaaatagtttctttggttttagttcagattatacattttttccctacattaagtgaaattagcggctcgccggttcgtttaaaaaaataccgtataatctgtatcaccgtatatagtccagcatagcattaataagttaatccgcgtacttcgggagtatggcagtacttgcttgcatgctacgacgccgggttcttcagttcagaggaagattagtagcggcagtggtacaaaaactgggctcctcttgcagtagacagtggacggacagaaataaatttggtgccgtgcaacgtacacgacatacacacatacccttgtcctcctgctcctgattggatcggtagaaaggtggcggatgctggattataataaaaaccctgtagattacacccataataaaatggtcaaggaccacgacaccacataaagacacccatccccgtgatcaactacctcaattagcctcccaagatccccctataatttaccataatttattcaaacagctggtacctctcctccgggttaataatacttatcgttttagacaaggacacgatataaaaaaaactttaaccattatttttcattataatatatatagaagtgttaacaaatatatgattttattaaattactttttaaaactaatctatacaggtagtcaccatatttaatagacaaatattttaaaaacaattcataatcaaagattctcaagtttgacatcacctttatctaaaataacaactattaccagcaccgaaggataatactaatttgaacatattcaccctactacaaatcttaataaaatctgaacaatggcctattggagttatagtactataatatatcattttccttagtagggccgagtttggttctaaatttttttttcgaactttcaatttttctatcacattaaaacttttcaacacacacaaacttccaacattttcatcatatcgttttaatttcaaccaaactttcaattttaatgtgaactaaacacaccctaggttactgtattttggcactgaggcggcacacatctacaagggaacgcacgaatctcaaagcagatgctcaggccgaacgcctccatctctaccgttcactgcgccacgttggtgtcctttttgcatgatggatcgctcgctacgagtttttttcttttttaagcggcagcggcaactggaaggtggaaggctctcctctgcttttaagaccagcgctgagacagatcgagcgatcagtcgaacgaacgagatgaagggaggaagggggagcaatggcgccgccaccgacctgctcgtctgcttcccgtcgcgggcgcacctggcgctgatgccgcccaaggcgatctgcagcccgtcgcggccgtcggcgtcggagccggtcaagcgccggcacagcacgagcaggtccgggccgccgccgccgtcggccgcgctcttcaaggcggcggccagtggtaggaacccgagccgccgcgccgcggacgtccccgtcgacaacgagccgtcgtcgccgaaggtgacgtgcgccggccagatcaaggcacggcggccggcggccaagcccaagatcagcggcgccggcggcggtgccgggggagcgaaggcggccaagaaggcgacgtggctgcaggcgctcggcatcaagaaggacgcgctgccgttcttgaacgccgtgcacggcgccttccgcctcaacgtcgccggctgcttcggtagctttcccggcgccgtggtggagtacacctccggggaggatgacgacgacgaggagctcgcggcggggaaggacacagagcacggggctgcattggccaagtggttcatggtgctcgaggaaggcaagaaggtatcaagcaggaagcgggagcaagagccgcagaagcagcaggaggaggaggagcaggacaagaaggaagcggacgtggcgccgccggcgaacgccctgatgctgatgcggtgccggtcggcgccggctaaggggttgccgaggaggttaggaggagatgcagaggaggaggtgatcaagaactccaagaaggaggaggaagaagaggatgagaaggaggagaggcttgtgctcatgagctacgcccctgacttcttcaaggtatccgtcgacatcgccaaggagacgtggatcgtcggcggcgacgacgccgtcttgcgctgccggagctggaagagatgatcaccacaaggatcgttctgtgagcaacgtatgtgtgttttgttctacttttttgctacatgcttgccttttcttttccttttttttcttccctcggagaattatatattcttctttatataaagctcatgtaaagggttcgatgagcacgcagcagattcttcatttgttctgccaaggccaccacaatggtctctctgcagaaggatttctgctctgtaaatagtgctgtaataaccttttactagatgctagtacacggtgaatagtacttttgtttgtgaaatgtaacgagtaatatatatatgatgagctgtatagctcactttaatttcctactttcctagtggagttaagatacaaccattagcgctttagccttgtatgatagattggaatctctatgatgaacttttcagaatatcttgttttctttttgcaaactgataatcatttgctggagtggttggtttacctctgctcagctcatattagctgtgataaaaaggcatgatcttaatgttgtatttggccacattttttaatggatcagtcacagttcgttagagaaggccatgttgttgaaagaattgtccttgtatgcccagaggcaattgttgccactgttgttatccgacagatgtacaggggaagtagtaggtggattaaaagctggttctagtgtcaactcggatttcttttagcccattttttgtcattccttttgaatcactacttattattaccacatccatttcaaaatataaacatttctatattctttaggaaaactacgttaagagaattcagtggtcaaattttgaattttgagttactcctttccaagcatctcattggttgaaaacgtaaagatttctatgtaatggaatcagtgcctaaaaatgtttattgcggtacaaaatttaaatcctagaaatgtttatattttgaaacatatggagtagttattagtctccgacctctgtataatgtgcaaaattttcggaaagtgctaagagaagttgatttttctaagtttcagagcataactgaaccagctcacctgttacgatctacaaactaaatcttatggagtactttacaattattgagaccaaacttagtgacaaattttccgattgtgttttctgaaaaatcaacggaaggttgaatagcgaacagatgcaagcattttttaattttgaggatttacataaaaaagatcatttagagaaacattgaacttgtaatagaattataattcttcagtagccctgtttactaaagagtttctctagtttttatgaactaaatctgctcgcgggaagtgtacatctagagctcacatttctcatccccggaactagcattagcctgccttaactgctggacattaccaattatgtgttcagctttaacagattctggacaagccgaaaaatgcaaaccattctcaatgccacataacaggttcagaatgaagaaactacaagcaaccatatgttcagacatccagaccattgtgccaaccaaactgataaatgaaagccatgcactacggtgtgcagtactgaagttcagttacatatacgcaccatcaatagtacagtcagtcacacggcacagcatttagcaatgcatgtcctgcaaaattttgtacaggcatccggattccagatatagtttcagcaagagggagccatgctcaaatggatactcactcattttctgtttgggatggatattagttttgtagtacaaagtacaacccagtatgttttttgtgtgaggcaaacttaaatcttcagaaactttcatggttgctatcactgccaacccacattcaaattaactagctatacttctcggtgcagcaagtattatgtacagtttcattactctcaattctcttgtaatttggcgtatagtgcacaaaaaaagaatcatactgacttgacactaacaaaccgcgcaatggtgcgtgctgcattgttttgtccaaagtcttgtcctcttcagatcttgcagttgatttcgggtagccgacagattaaagaagcctacaaggaagaataaacttatatagagatcaacatgccaatgctttgttctaaagaagaagcacaggcgagaatctccctaattttcaaacagcctttttatttctttatctgcgcgtggtaatcaactgctgtccttgacctaaccagttaaaattaaggtagataaagagtactgaaattctttttagagccgacacagtagtgcccaagtactatagggactacgatgcagttttggatttgtttctttccagtatgcaagcaatctacacaatgtctcccagaaaagtaccgatgagggcttttttgaaataaaattaaggaattcaagggcatgaaaatatgtcttcactgtccattttacttgatttttgtttgattgaaaaggacctggttttctctacgactgatttatcattttctagaacatatattagcaaatagtacatacttatatttctctttggtgtagtactatggtgaaacctagtaggaaaattattttgacggtatattcgatgaatgtaaacatgaattggtaaggctagctgtggttacatggcgtcactgttgtgatctgcttgcaatgcccccattcctctggctccggagcttggcttcgacctcggacagcgccttcttcatgtcctcgttctccgggagttcttggatcagcacctggtaatctcgcaacgacgcttcccatctctccagctgatcacaaaaacacagacaaaaagttcgttgacaaaaatgagatcgcgcattcatgtcaggtatggcgatgaaaatttccggcacggcggaggcagcgaaccttgacgttgcagtcggccctcctgaggcgcgccttgctgtacgccggccgcatggcgagcgcgccgttgcagtcctcgacggccttctcgtaccgcgcgagcctcgcgtggcacgcggcgcggttgcagagcagcacggcgttgccggtctccctgtcgaggccctcgcagtaggcggcgcacgcctcggcgaacctggacgccttgaagaggtcgttcccgcgcagcctcgccgacgccaccaccttggcccgccggtgcacgttcgcgatctcccggttgctcgggtcgagctggcacgccgtctgcgccgtcgccaccgcgtcctcaaaccttcacacatccagcatgaacacgacggcatcagaatacagccatctcatctctgctgatctccatttgatcgaggaagaggaaaaaaaataaaaaacaacgttgagaacgaacctcccagcagccatgtcgacctgagcacggatcatgaggacgtaggcatgggcgacggtgccgaagaacttggtcgattcgtcgacgccgaaccgcggcgcgccgcccagcacagcgtcggcctcgtcgtgccggctcagcttcaccagggcctcggcttgcaacgccatgaccttccagaaaaaaattccatcgtgacagagacgtatgatcagatcgctgcatttgatcggatgctggtcgtgtcgcgtaaacgttttctttccttttctttttctttttctttcacgtggcgcgagggacgctcacctgtggggcgcagtcggcgccgtcggcgacggcggcctgcgattcctgcagcaccgtgatccagttcctcagcttgcgcgcgtcgccgcacttggcgacgcggctcttgaccgactgtgcgcgcgacacgtccgcgcccgtcgagtcgttcgccgattgcttgaagtggtggattgccttgtcaggttctcctaatctgagcaataacagcaatggctgtgtttagttcacaccaaaattagaagtttggttgaaattggaacgatatgacagaaaaattgaaagtttatgtgtgtaggaaagttttgatgtgatgaaaaagttagaagtttgaagaattattttggaactaaaaacggtgtaagtttactatcgataaaaatcatcgtggtgttgtgtaaacaaaacaatgtcagtactcagtacagagtaggcagtagaaaaatgaagtgtgtgtggacttgttctctgacagatcgcaaaattcaacaagctagtactaagctagtgctgcaatcattctcttcaaaaagaagtgtgagaatgcttgtcgaggaagtgattagctattggaattaccaatcatcaatgtgatcgcaaatggctagagtaatttacggcagaaggtcttgcttgacctgctaaaccaatgatcaaatgatcaaatgttccaaaggagcacatgtatcaaattgtactattgcctaatcacaaacaatgggtaattccatttcttaagggaaaagtttgagatttccaagaaagaatagcagtacccctactcaaccatgaattcatttctttcaaaaaaaaatgaataagtcatcattgacaaagagccaatgctgatgcaaattagccattccattaactaattccccaacatctaaatttggtgcacctattttcggccaaaataattgcctacgaaatattagtgggtaaagttgaacaatcagttgtcgtcttgtcaaaagccatgatcaaatcccttttccaatagaattagatcatgctactataactatggtgctagtcaaatctgatttccaaatcaagtcacgatatgaactgacctaattccagtttttttttactaaagacctaattccagttgatcagtgtccttaagaattcctgtgcaaatactagttaatttcatttcttttgccggattcctaaagatttcaattgcactaatgacattggtgatgaacaatctgaacgcccaaatgcggaatgcgcgtacctgagatacagcccgccgaggcggtggtgcgcgcggccgtacgacgggtcgatccggacagcctccctgcagtcgccgacggcctcgatgaggcggccgagcgcggcgagcgcggcggccttgttgctccagtacgccggccgcgttggatccaccatgatggcctggtcgtagagcgccaccgcctccgcgtaatgcccctcccggtactcctcgttgcccatctccttgagcttctcggggtccgtccggtgcgacagcgcgcggcacagctcggacgacgccggcggcgccctcggctccttgacgatgttcccgaggccggagaacgcgtacccgttggtggccttccgctcgttcgccggcttgttggcggggttgcgttccagcgagctccgcgccgacgcgccggggacgccggcattgaggttgccgaggttgcggtggagcatcatgttgccggaggttgcgcgcaccagctgcgtggtgcccttgaccctctggtgatcgaggatcatcttgtcgagctccgctgccatcccggtgtactccgcggccggtgccgccgacgccgcattcctcgccccgccgttcgccgccttcgtcgcgtgtacggccctgtcgcttgccggtgcatgggcacgctgcgcgccgttgttcgtccctgggagcggcttggccgggcggtgcgcgagggacgagtcgtcgtggacgccgccgcccttccggtgcgcctggttcgccggcgcggaggccgccttggcctcggcctcgtgctcgtgctcggcggtggcgggtgggaccccgttgatgcgggcgatggaggacatggagtttgaccggcgtcgccggaacatgccgctgtagatgccgaacatcgcgcagccggacggcgggcggcgcgactccgtcatggcgaccggcgacgtccgcggccgcgcgcccgctccggccgttgtgtcgtgccgcgtcgtggcgagcgcgcgcaccgggaggcggggaagggggtcacgacgaggacgagggagcgcgggcgttggctcctggctggcaacgaacggcggggttgcgaggttggggtgggaatatttttggaggagggggatttaaattggggaatatttacatgcacccgcttgtacctgttcagttcatcctgtgggccattttgggcaagttctattatccttcctcttttttgttttgttttgttttgtttttcttcttggagagttggagtagatatggatttcttggaccatggtttggttggggaggcattcatggtgggaactgcttggttgggtcgaatgtcttggagtttattaatgttctactgtgttgatgaagtttgaaccataatttgaatttcttttgttgaaatttgaggcacatgggcaccaacgaaattagtttcttcgggagaatatgctaagacaaaatggggccacttactgtttaccatcataagacaacagaggttgatggaatggcagggtcaagacgattagtagtacgcctctgttttcctctttcgagaatagtacgtctctgtttttaaatatttgataatgttgacttacatgtttagaatggatagaataaaacttaagtgacgaaaacaacaatagagaagaagatcggtgtagtgtaaaaagagtagagaagcatgaggaaggtagaaggcagcggacatgtcgggaggaaaactggtgtgtgacctgaggtttgctgaagtgtggctaagaagaatggtttataattctttcttaaaaaaaaggagaatggtttatagctatagtcgttgcactaatctcaaagcaatcccaggctcaaaaaaaatgtttggtagtaccaagcatgaacatatgtgcaacctcgtgaaattattttactccagtgcctctcaagaaacgcttataagggacgtgggtcaaaaggttggtacaacatggctcgcttcctccgtgcatgtgtagcatgagtttacttgattgttttaactttggttaagagatgcttgctgtccgtcgctctgaaaattgggtgttaggcgtgagaagagaagagaggaatagagaaaattgagaaaatatgtaaaacgagataagctactagcgcgtaattaatttaatattaattattttaaacttaaaatatagattaatatttttttaaagcatttttttataaatagtttttttcaaaaaatatcatttagcagcttgggaagcgtgcgtgtgaaatacgatgttctttttttctcccttttcaactctcaaacagcatcagcttgtcaactatcaggcaaattctgatcagaagacagataacacaacagctatgcctgatccttttatttttcactactactactaaaaaacaaaaacttggggcggttgactcctgaccaccactaacctgttggatcgctggaaaatgttggaccagatcaaaccacgcaggcacgacttagctagcaatctggacttgggtttgtgttggccatttttgtgctccactattatgtgcacgtacgcaccgtcaccgacgacgtgaatcgtgatcgatcgatctgctccaaaacgtgttcgacgtgctaaacatggatagcacatcactaataatagcgtattgcgcgttagttggcaaagcagctagcaggtctcccatcgttctgggaatttggggtcactgtattttagaccaaaaagttaagcagcacaggcacgaacaaatctttctgtggtcagcgtcgtttctcgcatcattgcatggtgtgacggcagattgttatgatatcataaaagtataaaaccgttgccgcgtagcatcatcggatttcagtatttcagactgatatatgaatagtggttcgttagagctaacaaccctggtgtttgtggctgatgccgattaccgacaatacaatactggccgttgacaaccggttgatcattattataaacctattcatggtttgctgctactgtcaattgcaatttgcaaccgagcgttgaagagcatgtgaacgttggatcagtatgtgccatgaaattaagtatagttaagcaatcactaaggccacattcctgatctcccctgtcagtttcctgaaactaactctgcagcaggagttaagcgcgatcgaaaagcgtttccatgtaagaaatgccaaaacactcctgtctcggaagaattggtcgtctctctgtcgtacggagtaatgcctaggagacgtccaaatcaaaagccgatggcatgtctaaatcgcactacgagatcgaaaccgccctattctcaactcaagcgcaactaccgtttcaatacagtgatgagcagcatgggacagcgatgcgcatgggcttaccggaccatccaatagttactgtcctttatactcacagaataagtctattttactcccctcaactcatttccttgaatcacatcccttgattgcaaaatcgggtataacccatcctctaactccaaaaaccattgcaatcgactcccagggtggtttcggaggcagtttcatccgatgtggcaattgacttgttgcgtcatcaaatcggacccacttatcagtggcctccaactcatcctcacattccccctgacccctccatctttcatctattcctcttctctcaccttatcagggttattgataccacatatctaatagtaattgattaagctcggtgaggcccatcatataccaagtcttatacgaaatcatagctcgtatatagaatgagttccagataaggaaggacgagtagagttctatatgaaaactataatgactattcgaattgtatccatattggtctctctagttctacttggacaaagggacatctatgggtataaatacaataccccctaggaggaggggagacagaccaacaagacacaacagattgacacactaagccaggacaaaccaatacgccaccagacatcgacatcagagataagcctagacagacctcatccagtgcctgtggaggccgacaaagaggaatctagtgctatctctgatctcgacgagttcatattcgaggaggaagactaccctgtcatcgactacgtgttggtgttcgtgccaccatgtcgacgatagttatataggttatcccaaatattgtacttgtgtaattcagatgaataaagagcaacaccggctttggccaacatgagtatggctattacctgtcagataaggggccctaacatgtataaaaacccttgtctctatctcttttaactcaatctcggtaccaacgatccccataccatgcaaatacagtagtcgtgacctcaaacgtcgacacaccttccatcaatagaggtagcgcagcggtgacggcgcactagggaggagctcgccagctggccaacagcgctgcacgagttggaggagcttgccgatcgtcacgctagttggaccggcaaccttcttcagttggattggtcggcttgctcatcccacttctcggcatccaacttcatccacgcgctgcttgagtactctaggacccatgttgcacgcgctactctccgagacccacgttggcagcaagaccggggaggggggaggggaggctcgtgctctgtcccgtcgccgcctcctccatccacagttgcttgccgccatccatttgagagagagaggggggtaaagaggaaggagaaagggtaactgataggtgggcctgatatttatttttattgttttaccactgacatgtggatcctatttagatttgttttcattttagtgccacataagcgccacgttgatgtcacatggggtgaaggtcaagttaacccgctacgtaagtgtcatgtaggatgaaactgctattaaaaccaccgagggactctacttgtaccggtttttgaaattgagggagacgttatacccggttctgtggttgagggatgcaattcacctaagggcaagatatgagggaggtcaatagacttattccctttacttactcattccctgcctcactgggccttaccttttggaccttccaggccatatatggttgggccgaaaagggattacgtgaggcccgtatttggattcccccacatatggttgggccaaaactggattgtcatgtcatgtgcgtttacgtagtggaagttgggccagaataggactgtgacgtatgtgcggcccatattagtcgagaaacgaggttacggttgcgtacggctcaaaattatgtgatggagcaggatcccgttctactacgtaccaatatacttgtcttcagaaaaaataataaaatcatactagcatatactaatggattgtgccttgtgggtctctctgctttgattgcaaccagctcgccatgccgactcacttcatcatggctaatccttatccattgtttgatataaagcggatttttttttcgagacagagatagagcggtttgatttcataataaatcaatgagttttctttgtttattagcgagcacttagctcagtgataaagccatgcccgctccagcctgcagctggccgacacatcggtgcctcctttttatcagaagatactgtcgcattcgcacgtgcatgacttctctgtgttaactgctaatacgtggagtacgtcagtaaaataccgcctccaaaattgtaccagcaggtagtagctttttaaggcctgttcattttgatgtcattttcaaccttaccaaattttggtaaagttattaaaaaaagtggctacatttagtttgctgtcaaattttgataactatataagaaattctgtaaaaaattttggtaagtatgctaatttttggtaaggttttttttgacattaaagtgaacatgtcctaagtgtgtgcaggtatgcggtaattgattaattatccccatgcttaatcaacaggccgagagttcaactacgttgacgccacgatagcaagtcacgaacgcactgaatgacgcgtgtcgtactagttagcacatatattcctggtctatctcactgtatgacatcgtatacatggttacgttacacattgacggtatgtacacaccatctcccttggcagctaattagaagtcgtcagtcaagctagctaagctaagctagcgcgtgcgtctggatgataatattgcccacacgattcttccatgcgtcgacgttatgggaactgtatgcttgctagatcgatactgctgtactctcgtctgaactgagtttcagctacgtgatacatcgaccatcgtgaccgagaaattattggcgtacgtgagcttgaccacgggatttcagttgggaatccactagcagcgtggtcacacgagagggcagcatccgcaaaccgcaaatcatatgaactacctgtcatcgagttcatatctagaaagaaatggccaatggaactatatcaagtgcaacaaaaaggtttgctttactcgtgaacagaagttaatctaccgcgaaaagcaagatgtgttgcatgcagaggcagagcagagaagagagagtccgtcctacttgacctgccggaaaaagcttagcgatcgcaatgccatttcacaacgctcctcaactgtttgatctgccccccactggcttgtagaacaccctccttgttttaactgacgatcacttcacgagcacgagcacaggaagaactaagataaggatcaactcgccatgtactaatgtacagattaattactaatcgaagtcaaaacaacccaactcgattgttcgatacactaccgtctgattaaacatttaggttccgttctattctacaacgatagttggatgaaaataaaaattttcgtgacatgcttttcaaactgctaaacggtgtgtttcgtgggaaaactttctatatgaaagttgctctaaaatatcatattaatctattttttaagtttataataattaaaactcaattaattatacgttaataccatcttattttgcgtaaaaaattaatctttatctttatctttatatttatctttaggagaaaaaacatcactttatgtgtctgcttggcccaaaagatcgtctgcctggagaatatactaccgggataatcaccgaagaggtaaaagaatttagacccaggcggtaaattccagctaagtatatataagtagccatcaaacgcagctattccactggcaaacctacacacactattgagcctctgtcacgagaagccaatgtactcgtgcgaccacgaatgcacggcgccaacgcacaccgcgttcggcgccaagtaccagccgtgcatcggtgtctcggggcgccctgaccatcacgccgtcgggaggctgcagcagccggctggcaaggccgccgccgccgccgtcgtttccgcggccgcgcagcctcagcgcgccgccaagaagaggcatgcggcggcgccgccgccgcgcccgtcggcgtcgacgtcgcgccgctcgtcgaccaccgtggtggcgaccgacgtgtccagcttccgctccatggtgcaggagctcaccggcttcccggcggccgccatcttccggccgctgcctcgtaggatccccgtccacgcggtcaacccgtcgcccgcggtgcgtgggtacggtggtggcgcgcttcaggggcacggttcggacacggcgactgctgccggcagcagcagcagcagcaacccgggcgtctcgaccgtgcagctgatgcagtgctcgccgcccggcgtgttcgatgggctgccggaccttgggtcgccggagttcgactcgtggctcgatttgtccgacgagtaacctctccttgtcggactggtcaatggaagccaatacaatactgtagtaaaggtttggtaattggcagtacagtactttctttctgcgcatgcatctcttaaggttagtgtgttataacatccttgaaaaaaatgatggcgtttgtactcaagctttcccaaatttgcagaaatatgcgttaatacactcatgtaatctcaattcttggttggcttttttggacttcgttacttacaagattggttgaaattagtctagcaattctgtcggatgttcttctttcagagagaaaaaaaaagctgtcagatgttcaactacttcttggaattgacctgtctgttaatattgtctgtcttaatcggttgttgacatgagccggcctaatggcatacaagcaccagtatacaccgtcacgagtgacaacattgcgcggacatacgaaaaacggaaggtaaaagatcgccgctgacatgctcaaagaaattaattcatgtactgtaaacaggaagagtacaagagcctgataagttcgtggaagaggtttcagcgtacaagtaacaactgtcatgtactcactactgcaggttgccaccttctgataatctcctgaagtcaagtcctgatacacacgaaccatgtaagagccatgcgtagcaagttactacactgtgacaagtcttggtcactcgtgaaaattgacagccgatccaatctacgccgcaaaagtgccatagtattgagttgaatataccatgagattctcatgggagtatccgacaaaacatgtttagccttaagaacaattaagtttccacgattctatggtctcctatgtctgtaaccatcctctgctaactcatggcaccctattcccgaacgatgtaactgggctttttttttaaaaaccctattcccgaacgatgtaactggggttttttttttttgaaaactacctgaattccccacgcaacaataacgcttgataatgaaccaatactccaatagtatctgaagcagctcagatgacaaaccagtatgcaggacagattttattatatgagcactgctatgcagactagctcacttgtatcattcagaaacaacaaaatagaacacagttctatgcagatcttattttccgatcaaacaaggaggatcagacagacgagatggagcagatatacacctcactctgctccaaggagggcaaggagtatatcctcgtagtctctggttgtatctttagcaacagctcgctccaatgggacactgtttctcttctggtaggcctcctttatcagcttcaggtctacctcggcacgagttgttatgatccttgtaagagagttctcgtctgtgcccattcctcctagagccaatcgaatgactttctcaaagtatctgtcagggcaagtgaagcatcttatgatcgcccttagtgtaccaaggaactcgtccttaggatcagctttaagatcctgtcagtgtgccagaatgtgttagaagagtttcagacaaggacaggtcggcaaacgacattatggaccactagcaatgtgtaataatttcagttcctaaaataccatgttcagtgcaaacaatggcatgttactgaatgaaacatttcaatacaatgcatgttatcattcagcttagtgattggacaaggaatggtaagtaaaatgtttttcaacgggaaaaaaaacggttatcaatgctattattaccttagtgattggatggccgaactgatcattgtaactattgaatgttgctagtaactgtgctttgctccttgtggtgagaatcctgatgatttcatcgtcactgtaagccttgtcatggatcttctcatggagtattttggcttcagaatgtgccaacgatgtgttcacctctggcccatcatagcgatatacagtcacaagtggcaccaaaagctgcaagaaagaaataaaaataattcattttggtaacaagggtgttctttttttagcattgacgtatgcaatttagtagtatgtcacaaattttaaagcacaataataaaatggtccagtcaacgtaaactgaggagatggtcacattctagtatacagaccagggtaactgaagtgatatcatctcacacagctagtaactgcattatcttctcagatatgatcatctaagaactacgttaccatttatcaatgcccacacaaaatacaaataaaaaaagtggaattgcagtatactagagttaaattgaagagatgatttagatccttagcaaaacaattcatcttcaatattgagttatccactatacactacatactaatcatgagaacaaggagatcaagaagtaaacatctcgcataagtctattgtcatgataaacatctcgtatatccctgagaagcatagcagcaagtgtaaaattcatggtttctgtgattatgacagagatatcgatctatcaaaatttcaagaactccgtggtagatgatagattcaggatcatcaccttacggtagtcgccggtgatgtgcgccgcgacgtcctcctcgagcgacctcttgaagcgctcgtggtacgcctgcttcgcagcgaagagctgcgatggagtgcgcgtgcacgcgatctcgacgagcgcgcggccccccgggtgccacttcctcgcctcctcgttcgccagcaccgcgtcccgctccgccgggtccagcgtccactggatcaccgccctctgacaaaatcccaacccccacacgaatcaaatcagacagatagcgacggagctaaaggggggagccgattaatccgcacaagctagatcggggacctcgaatttgccgtggatctcgtcgttgagggcgcggagcagctcctcgccgtacgcctcggcgtaggcgcggcggatcgcccggcgctgcgccgcgtcgcggtgggcgaggatggagatgatgagcttctcgttcgtgccccaccctgcgggaccaccagtaaagcagatcgcgtcagcacccggtccggcctcgcgccggccggcggaggattaaggcgaggacggcggagcgcgcgcctgacctttgaacgccttgcgcagctgctcgcagtcctcggcgacgggcggcacggcggcgggcacggtgagcgtcgccattgatcgtcgctccggtgatcgatccaatcacggtctctcactttatgcctcagtgagatcgtgcgacgccgcggggcgcggcggggaggcgaaggggatttatgcggcggggaggagttcgaggaaagtttggacacggagtgtgcgtgcgtgcgcgcgcggtcggtgacggtggcgacagcgtcgcgtcgcgtcgcgcagggtatggaaagacacgatcacgggggagaggttggcaaggtgggacccgagacttcagtacgtgtccgtgcctgagacgccacatgttgggcaactggacgcggtgatggcatcaataggaaggtcttgatgacgaataatttagctaccttaagtggattaggtggtggttaagaccgtccaaggcgttaatgcgtgtgactgtcatcatttgcaagtttgtaaccggtaatacgtgtgacagtgtgactttgtcgggatgtgcaagtttgtggatgtttctcgttatggtattattaattgttgatctttacaaatataacatgctatattagaaaaaaacaagaagttatatttcttcgttgatttgtgaaggtcagtttaaggggcttttatgttccgattaatattcgttaccgtattcgtttcgattcgtattcgctccgtatctgtatttgataatattcgattccgttttcgtatccgggtttccgattccgatttcgattccgagaaaaaaaatatgataatgaatatgataaagttagtttccaaccgtatccgatccgttttcatccctattccaagaacaaccatgtgtgcgcttttcatagtgcatttggtggtggcgatagaatacttggattgggggtggcagcacggagattaaattaaatcatgctgtattagggctggttgtaacaatgtgattgggacactagcttgtttaggccgatggttatacttatacgccgttgcttagcgctcctaacttactattgacggatcatacagggttacacgcgtaaccgttcttactaggaattaaagcaatgtgcacgcaaggacgcaacaatcctaacatccttagcagcttcacatcttcaccaaaactattgcctgccctgcccggccgtcaatggatggccaccacagaaagtcggaaaacgttttgctgtttaggctgtctgatgtttgaactttctagcccatcgttcccttcctagggtgtgcttagttcacacaaaaattagaaagtttggttgaaattggaacgatgtgatagaaaaattagaagtttgtgtgtataggaaaattttaatgtgatgaaaaagttagaaatttaaagaaataatttgaaactaaactcggccttaatttagaacaactctaactaatggataccatacacaattctgactagtgcaacagtgactgcacagttaggcacttattgggcacagccacgtagccaattgacctccaaagtttctctcgagatatggctatatttaggtacagtggtgtaaagttttggcgtgtcacatcggatatacggacacacattaaaagtattaaacatagtttaataataatacaattacaaaatccgcatgtaaaccgcgagacgaatttattaagtctaattaattcgtcattagcaaatatttactgtagcaccacattgtcaaatcatgacgtaattatgcttgaaagattcgtctcgcaatttacacgcaatctgtgtaattagttgttttttttatttatatttaatactttatatatgtgaccaaatatttcaaagtaacagggctaaattttagcggggggataaacaggcgcagtagtgccggtagggcgatgaatgcatggccatcgagagaaacattaaatgcgtgcagagaccgttgttttcctgtagttgttttttttggacccctttgaatcacggaaatagaaaaacggaggaataagtgtaaaacagagcattgcaaaacacaggaaaaatataggaatgaccgtttgattggaccacaataaaaacacatgaatttgaggagagataaagactcaaaggatttcttccatgaggttctacctcttgttaaaattcctccaaaacttgtatgggaagaggcattccatagtaatttcatagaattccatagcgttcattcctttgattcaaagggctttgtagaaaaaattcctataaaaataaaatcctctaaaatttctatgaatttcctccgaatcaaagcgggccttatttttttctggacggccagctttcagagttcagaacgaacataaagacgcgatgatgatttggaacgtacgtcaccgttcctgcgtcatcgctttgcctaaggtttcgatgaggattgaactggaatgagatgaacacagaacaattccccaccccaatcttttttcacttatacttatgttatgtttattagttaaaatttaaattttcaatcttagatttaaaattaattttaagttttcttcatcaaaatttatttttagcatttgcttttagatagttataagaatacatatataaaatttttattcataaattattttcgtttgcaaatatgtacccgaagtactccgaacccgaagtcaaataaatttgacagaggagtattgagtctgtataaaacccggacaacaaaagcttgaagaattcctacctgtggtaaaacagcatcgtccacggtacggtgcgcacacagacacacaaatcgaacactcttgcactaataaattcagggtgtgtttatttcttttggtgtaaagtttttaaagtatacgaaaacatttaaagtattaaatgtagactaataatgaaacaaattacagactccgtctgtaaactggacaaatttattaagcctaactaatctatcactactaagtgttttactgtagtatcacattgtcaaatcatgacgtaattatgctaaaaaaattcatctcgcaatttacatgcaaactgtacaattgaatttttcttttcatacttaatgtccacgcatgtgttcaaatatttaatgtgatttttttaaaaaaaatttttgggatctggcctcagcagagatcttctccgacgtccctgacgagttacagtaacaagctactccagctttccatgtgtcaaatccaggctagtgtgatagtgtcacgcccgctatcctgtaccgttgcacatcgatcgtgatttgtcacgtgaaatttcattaccacgccagaaaaaaaaaaaaaagcccgcccgggccgagccgaatcgctcgattatccgtccgtccgagcgcgtctatctcccaccgccactttgccattgtcacgaaaggcgcgagagcggagaaccagttccgcttatgggcaggcgcggtcgcggaacctttgaaacgtgacgaccgagacgtgacgtatccgagccgcgcgcggaggcgagcgcgacgtcgctgtcgcgcggcccgtttctggcgccctccgcggcgtcacgtcgcggcgcgggtcggccaccgctgctcttccggcgcgaagagtcttgttggttgggtgactcgatccccatccccaacccaaagcatatccctcctccgggacaagcgttctggcgcgcacttggcccagcgcctaactccctttcacccaacacacggttcggcgccgatgctagctgctgctgcctcgtctcgtcgcgtcgtagcctaagcaccgcaacgctagaagccgagactggtctatggctaggctaaagcttgcccgatctggaggttaggcgcgcgccgcagcggggggcgacgatgatataaatggccactagcgctagctacccctcctgctccttgccgaattgccgtgcacagtgcttttttttcttcttcttcttcgtcttctcccttgccatctctgcgctccgatccttggttgagctgctgtcttgtttgtttggctggatcaataatgcatgcgtccgtggggaggagatgggggtttgatccttgcgacgaggtaagtgttcttcagctttctcgttgcatgatgcatatatactgctttgtttctccagcttgtttgatcagtagaatcgatgtagtatcttgtatttttgttgtgatcttgctcaaaattaatatgggtattggccctccaagaaagaacttatggttattgtttggttgttaacttgttatgcttgaagttctttttttttttttgagaacaattatgcttgaagttcatgtacggaaacggagtcgtatgtactctgtatagttcagtacagtagttggtatggactggagttgatgctgctgactttcattttgatctactacatctgatctgcgaactagatgagagtcatcaggaaaaattgaagaaataataactaaccgtttaacagtacagagaaaaaatatcatactactagtacagaaagattggtactgctataaatttcttactgttgaactgtaatgttctagtagcttttctggactactaaagatgaagcgatttttttctcaggtcacccacgttgttatgaatgactttgctctgatgaatgaccacaccgtgctgcttcaaggccatgacaagtcaaggatcagcccagctggttatttgacaaggtcaggacctacacagggcggtggcatcagaaacaatattggatattgtgacgggagatccatcaatgaatcctgcggtaaaagaagcacttatccaccaacttacaagaaagatgtcactgttccaaaaagtacgcaatcttgcttgtatctttcctttttgataatggagcttttatgatggatagttctagtctaagaccatgtctatgaaatgcattcattcaggtacaaaaccaagcatttttgatgctgatgaatatgtcagtgttagcaatgtttcagacgttccttcgtcagaaggcaatactatgcaggatgagcacaggaacaaagggaaagatttgttatactgtgattggtctgaactgctcaacttggatgacctcgaagcagatctgaggtaatctcttgctgcctccagcatctatctttatccatcagaagctgagtcctttatgtgaatcttgaacatttttctttcatttttttctgaagaagtttcgagtccacgtttgagataggaagtaatcactttgaagatccactgtggtcttcagtttgcttaccagatgcccagctagtaccaagcagctgtctcttggacaataccaatttgtcaactgtttcgaatgagagcacaacaaagtctatattatcatcagtttcagtttccgatactactagtgctgaaccattgttccttgatcaggtacttccaaacttttgatctttctaattgatttccccctaattttataggttagatgatgccgagggtttcttccccagggtagcttctcttgtcattccgagagtcaagatctctggcctcttcaatatgcaacaaatctccagatcatatgtttcctcaaaataatcttggttccatataggaacattttaacatttctcttcaatttatctctgcagaataatatggcaaatcctatcaacatacaacaaccacccagcaaaggaagaagttcggcaactttgaatcatgaagcacttgcctgttcttccggggaaatcgagcgattttcacaacattcagatgttgatgttttctacccatttgacaatgtaacaagctcggaacgcataagtggctgtgagggactagaggctatcttttgcacaaatcaggaaatgctagccccaacaacatcaagcatcatgtgtgatgatgaaattgtatcttcatcgactttctcagcaccggatctcgttgcaacctacgttccgcgttcgatgaagagatctcatgatccactgaatggaactccagacatgatcctcgacgaaatggctggaaatccactagagatgtatttccctccatcattgactgcatatgaacacccagaacatctgaataacgttactttgacacaaacacaccagtttcctgaaggatttgcaggtgacgatgttctgaaaagtgcagacttacagttcctctcgaagggaaagacttcagcagacttatgtgtgaacccttgctcaccactgattctagaagctgtgccagttaaggatcttggcttccataagcttcaggaaggcatgaatcaggtatactaatagtatcagtaacttagaacaccctcttgcaacccttctagctatgttgcattcttcaggaatttgtgaatgcaattagctattattcaggttgataatatttcagattgtccatgataagtattcagctcttgtatccttccaatgtactttgcagttggacgtggcatccaaagctcgcataagagatgccttgtatcgattggccaattgtgttgagcataggcatcgcattgctagtacaacagagaccgttaaccaacttggagttatggaatcatcagcttcaaagaggtacaacggtttaatgtgatcttcaattatgtttaggacacttgaagtgatcgacagctgagtttttgtgaagtgtaattttctgacatgttcaaatcaaacaggtggagagaaattcagatgatgaaccctatggatcgctcagtggcacagctgcttctccagaaaccgctccaccataaatctccacctgattcggcgctcggcattggtccctgaattgtactgcaccgtgaaaaacacgtaggagtggctgctgatgcgatgtggttttttttactgcacatgtctgatcgattgagcattctaggtccggcaattttttttccctctcggttccggtacgcatgtatatacagtaatcactaaagagtacagacttactagatgaaatgtaatgtgatagcaacgctttgctgttcagagatgtgattctaaatagaaactacagtgttttttttttgttgtcttcagcatttacctgtgacttgtcagatgccccattgtaccgtccaaaaatttcctctattgacggttaccccttggtcgcagatttacacggtttctcttattgacggttaccatggtaattaggcttatcacgtgtgcggaaacgataagtgccggataattctaccaagttcaaagaaacttaaatgtaaactctctccagttttttcacggttcatcacgataaccgcaatggttaccgcggtcgttggagataaaccctgtcgccgaaccgaggccgcctgtgcactaaccgccaattagaggaaaggaaacaaatcttgcaagtgtgcaagtgaccgggctagataatccaatcttgacttggcagttgtgttcgccaccgaacggcaggagaagcgaagcgtggggaggaaaaggcccaaatcctcgcctcctcctgcctgcaaccaccgcctccgtcgtctcgtctcccccggcagaggaatccccaacccggaagctttcgggagtcggacgagctcgccttgactcgcgtccccctccctcgcgcgcgcgcgcgctcgtcgcctcctaaacttagcggccgcgcgggacgcggaggggcgctcccctccagaaataggcggggtgggtggcgaggaggatggggtacctgccgtcgtcgctgggcagcaaggcggcgcacttcgtgtccgacctcaccaccgtcatcctcaacccaatctccgagcgcgagccttcctccccactccccgtgagacccgagatctctctctctctctccatctctcctctctaccgttcctcgtagtgcgggcagtttatatctggttttgaattgtgatcggtttgcggctcgcgtcctagatttgcgcgatcgggctgagtcggatgctgccggtagagatatcagcgtggtttggactttttggagtgatttcgccgcagggatcatcccgttgctagggtttttgtgtaggttgctgaattctctgcctgtctttgtttagttttctgtgggggtttgccgcgatctggatgagtggcaacggaattggagaatgctgatagatagtggacttcgtcgggtggggatatttgtgttctttttgacatgattgaggacttgagaagttgaggtagctgcaatagtaaagttagctcacctgtatgtttctacttgctacctgaaagttgttcttcgtattgtcagcttctgctagtctcgagaggggaaatagttctgttccatctcagtgcgcttttgaaagcctaccccagctgtttatctgttgtctttgttgatgtatccctttgcattctgttatagtttaaagatggtttgcattgttgattgtttgaaataaattgttactgcatgtgtttgatctttgatgccagtttgtagctatgaattgccgctaatcactgacccgtgtttcactcaccatcttgttttccagtaagctcacatctcaagttctttgatcgttgtaggaggtggacaaagacgaagaaaaatcagaggatgacaaagattctgagcaaaattctgacacccccgatggccctgacacatcttcctttagagcattcttgatctcattcctgtcatcatctggttctagtaatggttccatggagataattcctgatcagaatggggaattgggatacccaactttaacaccaatggggaagtcaaaaaagggaaagtctgggctcctaagtagaggaaaacattccattggaaaaatcattagcaaagcggctagaattggtggtttcaaacaaaatgtggagcctaagattgatagagaggtggtagatcatgttgaatcagtttcacctgtattggagcttgaagaatcaaaggaagttgcttccttcattaatttgccagctatgtcagaaccatctgttcttttgtcagaagtgatgaggttcaatatttatgcatcttttcctgttcttgccaaaggaatgaactgggtcttgctatacaggtttaaaacatgtctgtt
